(19) United States
(12) Patent Application Publication
(10) Pub. No.: US 2026/0146253 A1
(43) Pub. Date: May 28, 2026

(54) COMPOSITIONS AND METHODS FOR PROGRAMMED DEATH LIGAND RECEPTOR (PD-L1) EXPRESSION

(71) Applicant: NOVO NORDISK A/S, Bagsværd (DK)

(72) Inventors: Shanthi Ganesh, Shrewsbury, MA (US); Marc Abrams, Natick, MA (US); Henryk T. Dudek, Belmont, MA (US); Harini Sivagurunatha Krishnan, Lexington, MA (US)

(21) Appl. No.: 19/460,949

(22) Filed: Jan. 27, 2026

Related U.S. Application Data
(63) Continuation of application No. PCT/US24/39733, filed on Jul. 26, 2024.
(60) Provisional application No. 63/516,270, filed on Jul. 28, 2023.

(51) Int. Cl. C12N 15/113; A61K 31/712; A61P 35/00

(52) U.S. Cl. CPC C12N 15/1138; A61K 31/712; A61P 35/00; C12N 2310/11; C12N 2310/321; C12N 2310/3515

(57) ABSTRACT

Oligonucleotides are provided herein that inhibit CD274 expression. Also provided are compositions including the same and uses thereof, particularly uses relating to treating diseases, disorders and/or conditions associated with aberrant CD274 expression.

### CROSS-RELATED APPLICATIONS

[0001] This application is a Continuation of Application No. PCT/US24/39733 filed on Jul. 26, 2024, which claims the benefit of U.S. Provisional Application No. 63/516,270 filed Jul. 28, 2023. The entire contents of these applications are incorporated herein by reference in their entirety.

### REFERENCE TO ELECTRONIC SEQUENCE LISTING

[0002] The application contains a Sequence Listing which has been submitted electronically in .XML format and is hereby incorporated by reference in its entirety. Said .XML copy, created on Jul. 22, 2024, is named “DCY-10825.xml” and is 3,044,713 bytes in size. The sequence listing contained in this .XML file is part of the specification and is hereby incorporated by reference herein in its entirety.

### BACKGROUND

[0003] Currently, chemotherapy is the leading cancer therapy worldwide, often combined with surgery, or surgery and radiotherapy, depending on tumor type and stage (Abbas et al., An Overview of Cancer Treatment Modalities/IntechOpen, 2018). Since the discovery of several important mutations that contribute to carcinogenesis (e.g., adaptive immune resistance) these mutations and the proteins they represent have been extensively used as targets for the development of more selective drugs and drug combinations to treat cancer patients. Despite the effectiveness of these drugs, multidrug resistance (MDR) is often seen in patients, which often results in tumor relapse, limited therapeutic options and low quality of life for patients. In addition, cancer research has often been focused on tumor cells even though the effect of the tumor microenvironment and the ‘normal’ or non-cancerous cells within it that have been shown to play a key role in tumor progression, development and MDR (Klemm et al., TRENDS CELL BIOL (2015) 25(4): 198-213). Novel therapies that target different facets of the TME that contribute to tumor growth are needed.

### SUMMARY OF DISCLOSURE

[0004] The disclosure is based, in part, on the discovery of oligonucleotides that target PD-L1 mRNA and reduce expression. The disclosure is further based on the discovery that a combination of PD-L1 oligonucleotide and a CTLA-4 inhibitor provides synergistic anti-tumor efficacy for tumors having varying tumor microenvironments. Specifically, as demonstrated herein, a PD-L1 oligonucleotide conjugated to a lipid (e.g., a C18 hydrocarbon chain conjugated to the 5′ terminal nucleotide), when delivered alone or in combination with a CTLA-4 antibody, reduced tumor volume in vivo. Further, as shown herein, treatment with the PD-L1 oligonucleotide reduced tumor burden in an inflamed tumor microenvironment. In addition, the efficacy of the PD-L1 was dependent on the presence of CD8+ T cells.

[0005] Accordingly, in some aspects, the disclosure provides an oligonucleotide comprising an antisense strand comprising the nucleotide sequence of SEQ ID NO: 728 and a sense strand comprising the nucleotide sequence of SEQ ID NO: 487, wherein the sense strand comprises a saturated C18 hydrocarbon chain conjugated to the 5′ terminal nucleotide of the sense strand, and wherein each of the antisense and sense strands comprise at least one 2′-modified nucleotide and at least one modified internucleotide linkage.

[0006] In some aspects, the disclosure provides an oligonucleotide comprising an antisense strand comprising the nucleotide sequence of SEQ ID NO: 728 and a sense strand comprising the nucleotide sequence of SEQ ID NO:487, wherein the sense strand comprises a saturated C18 hydrocarbon chain conjugated to the 2′ carbon of the ribose ring of the 5′ terminal nucleotide of the sense strand via a linker, and wherein each of the antisense and sense strands comprise at least one 2′-modified nucleotide and at least one modified internucleotide linkage.

[0007] In some aspects, the disclosure provides an oligonucleotide comprising an antisense strand comprising the nucleotide sequence of SEQ ID NO: 725 and a sense strand comprising the nucleotide sequence of SEQ ID NO: 484, wherein the sense strand comprises a saturated C18 hydrocarbon chain conjugated to the 5′ terminal nucleotide of the sense strand, and wherein each of the antisense and sense strands comprise at least one 2′-modified nucleotide and at least one modified internucleotide linkage.

[0008] In some aspects, the disclosure provides an oligonucleotide comprising an antisense strand comprising the nucleotide sequence of SEQ ID NO: 725 and a sense strand comprising the nucleotide sequence of SEQ ID NO: 484, wherein the sense strand comprises a saturated C18 hydrocarbon chain conjugated to the 2′ carbon of the ribose ring of the 5′ terminal nucleotide of the sense strand via a linker, and wherein each of the antisense and sense strands comprise at least one 2′-modified nucleotide and at least one modified internucleotide linkage.

[0009] In some aspects, the disclosure provides an oligonucleotide comprising an antisense strand comprising the nucleotide sequence of SEQ ID NO: 732 and a sense strand comprising the nucleotide sequence of SEQ ID NO: 491, wherein the sense strand comprises a saturated C18 hydrocarbon chain conjugated to the 5′ terminal nucleotide of the sense strand, and wherein each of the antisense and sense strands comprise at least one 2′-modified nucleotide and at least one modified internucleotide linkage.

[0010] In some aspects, the disclosure provides an oligonucleotide comprising an antisense strand comprising the nucleotide sequence of SEQ ID NO: 732 and a sense strand comprising the nucleotide sequence of SEQ ID NO: 491, wherein the sense strand comprises a saturated C18 hydrocarbon chain conjugated to the 2′ carbon of the ribose ring of the 5′ terminal nucleotide of the sense strand via a linker, and wherein each of the antisense and sense strands comprise at least one 2′-modified nucleotide and at least one modified internucleotide linkage.

[0011] In some embodiments of any of the foregoing or related aspects, the 2′-modified nucleotide comprises a 2′-modification selected from 2′-aminoethyl, 2′-fluoro, 2′-O-methyl, 2′-O-methoxyethyl, and 2′-deoxy-2′-fluoro-β-d-arabinonucleic acid.

[0012] In some embodiments of any of the foregoing or related aspects, about 10-15%, 10%, 11%, 12%, 13%, 14% or 15% of the nucleotides of the sense strand comprise a 2′-fluoro modification.

[0013] In some embodiments, about 25-35%, 25%, 26%, 27%, 28%, 29%, 30%, 31%, 32%, 33%, 34% or 35% of the nucleotides of the antisense strand comprise a 2′-fluoro modification. In some embodiments, about 25-35%, 25%, 26%, 27%, 28%, 29%, 30%, 31%, 32%, 33%, 34% or 35% of the nucleotides of the oligonucleotide comprise a 2′-fluoro modification.

[0014] In some embodiments of any of the foregoing or related aspects, positions 8-11 of the sense strand each comprise a 2′-fluoro modification. In some embodiments, positions 2, 3, 4, 5, 7, 10 and 14 of the antisense strand each comprise a 2′-fluoro modification. In some embodiments, the remaining nucleotides comprise a 2′-O-methyl modification, provided the 5′ terminal nucleotide of the sense strand conjugated to the saturated C18 hydrocarbon chain does not comprise a 2′-O-methyl modification.

[0015] In some embodiments of any of the foregoing or related aspects, the at least one modified internucleotide linkage is a phosphorothioate linkage.

[0016] In some embodiments of any of the foregoing or related aspects, the sense strand comprises a phosphorothioate linkage between positions 1 and 2 of the sense strand. In some embodiments, the sense strand comprises a phosphorothioate linkage between positions 1 and 2, 2 and 3, and 3 and 4 of the sense strand. In some embodiments, the antisense strand comprises a phosphorothioate linkage between positions 1 and 2, 2 and 3, 20 and 21, and 21 and 22. In some embodiments, the antisense strand comprises a phosphorothioate linkage between positions 1 and 2, 2 and 3, 3 and 4, 20 and 21, and 21 and 22.

[0017] In some embodiments of any of the foregoing or related aspects, the 4′-carbon of the sugar of the 5′-nucleotide of the antisense strand comprises a phosphate analog. In some embodiments, the phosphate analog is oxymethyl phosphonate, vinyl phosphonate or malonyl phosphonate.

[0018] In some aspects, the disclosure provides an oligonucleotide comprising an antisense strand and a sense strand, wherein the antisense strand is 20 to 30 nucleotides in length and has a region of complementarity of 19 to 29 nucleotides to a target sequence of CD274 as set forth in any one of SEQ ID NOs: 2, 5, and 9, wherein the sense strand is 28 to 40 nucleotides in length and comprises at its 3′ end a stem-loop set forth as: S1-L-S2, wherein S1 is complementary to S2, and wherein L forms a loop between S1 and S2 of 3 to 5 nucleotides in length, wherein the antisense strand and the sense strand form a duplex region of at least 19 nucleotides in length, and wherein the sense strand comprises a C18 hydrocarbon chain conjugated to the 5′ terminal nucleotide of the sense strand.

[0019] In some aspects, the disclosure provides an oligonucleotide comprising an antisense strand of about 20 to 22 nucleotides in length and a sense strand of about 28 to 40 nucleotides in length, wherein the antisense and sense strands from an asymmetric duplex region of about 20 to 22 base pairs comprising a 3′ terminal overhang of at least 1 nucleotide of the antisense strand, wherein the antisense strand comprises a region of complementarity of 19 to 21 nucleotides to a target sequence of CD274 as set forth in any one of SEQ ID NOs: 2, 5, and 9, wherein the sense strand comprises: (i) a stem-loop at the 3′ end of the sense strand, wherein the stem-loop comprises a nucleotide sequence represented by the formula: 5′-S1-L-S2-3′, wherein S1 is complementary to S2, and wherein L forms a loop between S1 and S2 of 3 to 5 nucleotides in length, and (ii) at least one C18 hydrocarbon chain conjugated to the 5′ terminal nucleotide of the sense strand, and wherein each of the antisense and sense strands comprise at least one 2′-modified nucleotide and at least one modified internucleotide linkage.

[0020] In some embodiments of any of the foregoing or related aspects, the antisense strand comprises a sequence as set forth in any one of SEQ ID NOs: 725, 728, and 732.

[0021] In some embodiments of any of the foregoing or related aspects, the sense strand comprises a sequence as set forth in any one of SEQ ID NOs: 966, 969, and 973.

[0022] In some aspects, the disclosure provides a CD274-targeting oligonucleotide for reducing CD274 expression comprising a sense strand comprising the nucleotide sequence as set forth in SEQ ID NO: 1050 and an antisense strand comprising the nucleotide sequence as set forth in SEQ ID NO: 1005.

[0023] In some embodiments of any of the foregoing or related aspects, L is a tetraloop. In some embodiments, L is 4 nucleotides in length. In some embodiments, L comprises a sequence set forth as GAAA.

[0024] In some embodiments of any of the foregoing or related aspects, the antisense strand comprises a 3′ terminal overhang of one or more nucleotides in length. In some embodiments, the 3′ terminal overhang is 2 nucleotides in length, optionally wherein the 3′ terminal overhang sequence is GG.

[0025] In some embodiments of any of the foregoing or related aspects, the oligonucleotide comprises at least one modified nucleotide. In some embodiments, the modified nucleotide is a 2′-modified nucleotide. In some embodiments, the 2′-modified nucleotide comprises a 2′-modification selected from 2′-aminoethyl, 2′-fluoro, 2′-O-methyl, 2′-O-methoxyethyl, and 2′-deoxy-2′-fluoro-β-d-arabinonucleic acid.

[0026] In some embodiments of any of the foregoing or related aspects, about 10-15%, 10%, 11%, 12%, 13%, 14% or 15% of the nucleotides of the sense strand comprise a 2′-fluoro modification.

[0027] In some embodiments, about 25-35%, 25%, 26%, 27%, 28%, 29%, 30%, 31%, 32%, 33%, 34% or 35% of the nucleotides of the antisense strand comprise a 2′-fluoro modification. In some embodiments, about 25-35%, 25%, 26%, 27%, 28%, 29%, 30%, 31%, 32%, 33%, 34% or 35% of the nucleotides of the oligonucleotide comprise a 2′-fluoro modification.

[0028] In some embodiments of any of the foregoing or related aspects, the sense strand comprises 36 nucleotides with positions 1-36 from 5′ to 3′, wherein positions 8-11 comprise a 2′-fluoro modification. In some embodiments, the antisense strand comprises 22 nucleotides with positions 1-22 from 3′ to 5′, and wherein positions 2, 3, 4, 5, 7, 10 and 14 comprise a 2′-fluoro modification.

[0029] In some embodiments of any of the foregoing or related aspects, the remaining nucleotides comprise a 2′-O-methyl modification, provided the 5′ terminal nucleotide of the sense strand conjugated to the saturated C18 hydrocarbon chain does not comprise a 2′-O-methyl modification.

[0030] In some embodiments of any of the foregoing or related aspects, the oligonucleotide comprises at least one modified internucleotide linkage. In some embodiments, the at least one modified internucleotide linkage is a phosphorothioate linkage.

[0031] In some embodiments of any of the foregoing or related aspects, the sense strand comprises a phosphorothioate linkage between positions 1 and 2 of the sense strand. In some embodiments, the sense strand comprises a phosphorothioate linkage between positions 1 and 2, 2 and 3, and 3 and 4 of the sense strand. In some embodiments, the antisense strand comprises 22 nucleotides with positions 1-22 from 3′ to 5′, wherein the antisense strand comprises a phosphorothioate linkage between positions 1 and 2, 2 and 3, 20 and 21, and 21 and 22. In some embodiments, the antisense strand comprises 22 nucleotides with positions 1-22 from 3′ to 5′, wherein the antisense strand comprises a phosphorothioate linkage between positions 1 and 2, 2 and 3, 3 and 4, 20 and 21, and 21 and 22.

[0032] In some embodiments of any of the foregoing or related aspects, the 4′-carbon of the sugar of the 5′-nucleotide of the antisense strand comprises a phosphate analog. In some embodiments, the phosphate analog is oxymethyl phosphonate, vinyl phosphonate or malonyl phosphonate.

[0033] In some aspects, the disclosure provides a pharmaceutical composition comprising an oligonucleotide of any embodiments of the foregoing or related aspects, and a pharmaceutically acceptable carrier, delivery agent or excipient.

[0034] In some aspects, the disclosure provides a method of treating cancer in a subject, the method comprising administering to the subject an effective amount of an oligonucleotide or pharmaceutical composition of any embodiments of the foregoing or related aspects.

[0035] In some aspects, the disclosure provides a method of treating a disease, disorder or condition associated with activated CD274 expression, comprising administering to a subject in need thereof an oligonucleotide or pharmaceutical composition of any embodiments of the foregoing or related aspects.

[0036] In some aspects, the disclosure provides a method of treating cancer in a subject, the method comprising administering to the subject an effective amount of an oligonucleotide or pharmaceutical composition of any embodiments of the foregoing or related aspects, in combination with a CTLA4 inhibitor.

[0037] In some aspects, the disclosure provides a method of treating a treating a disease, disorder or condition associated with activated CD274 expression, comprising administering to a subject in need thereof an oligonucleotide or pharmaceutical composition of any embodiments of the foregoing or related aspects, in combination with a CTLA4 inhibitor.

[0038] In some embodiments of any of the foregoing or related aspects, the disease, disorder, or condition associated with activated CD274 expression is a cancer. In some embodiments, the cancer is selected from carcinoma, sarcoma, melanoma, lymphoma, and leukemia, prostate cancer, breast cancer, hepatocellular carcinoma (HCC), colorectal cancer, pancreatic cancer and glioblastoma.

[0039] In some embodiments of any of the foregoing or related aspects, the cancer comprises an immunosuppressive tumor microenvironment. In some embodiments, the cancer comprises an inflamed tumor microenvironment. In some embodiments, the inflamed tumor microenvironment comprises infiltrating T cells.

[0040] In some embodiments of any of the foregoing or related aspects, the CTLA-4 inhibitor is an antibody. In some embodiments, the antibody is an anti-CTLA-4 antibody. In some embodiments, the anti-CTLA-4 antibody is selected from Ipilimumab and Tremelimumab.

[0041] In some embodiments, the disclosure provides a method for delivering a CD274 targeting oligonucleotide to a lymph node of a subject, comprising administering an oligonucleotide of any embodiments of the foregoing or related aspects.

[0042] In some embodiments of any of the foregoing or related aspects, the lymph node is a tumor draining lymph node

In some embodiments, the disclosure provides for use of an oligonucleotide of any embodiments of the foregoing or related aspects in the manufacture of a medicament for the treatment of a disease, disorder, or condition associated with CD274 expression, optionally for the treatment of cancer.

[0043] In some aspects, the disclosure provides an oligonucleotide of any embodiments of the foregoing or related aspects, for use, or adaptable for use, in the treatment of a disease, disorder or condition associated with CD274 expression, optionally for the treatment of cancer.

[0044] In some aspects, the disclosure provides a kit comprising an oligonucleotide of any embodiments of the foregoing or related aspects, an optional pharmaceutically acceptable carrier, and a package insert comprising instructions for administration to a subject having a disease, disorder or condition associated with CD274 expression.

[0045] In some embodiments of any of the foregoing or related aspects, the disease, disorder or condition associated with CD274 expression is cancer.

[0046] In some aspects, the disclosure provides for use of an oligonucleotide of any embodiments of the foregoing or related aspects in the manufacture of a medicament for the treatment of a disease, disorder, or condition associated with CD274 expression, in combination with a CTLA4 inhibitor.

[0047] In some aspects, the disclosure provides an oligonucleotide of any embodiments of the foregoing or related aspects for use, or adaptable for use, in the treatment of a disease, disorder or condition associated with CD274 expression, in combination with a CTLA4 inhibitor.

[0048] In some aspects, the disclosure provides a kit an oligonucleotide of any embodiments of the foregoing or related aspects, an optional pharmaceutically acceptable carrier, and a package insert comprising instructions for administration of the RNAi oligonucleotide in combination with a CTLA4 inhibitor to a subject having a disease, disorder or condition associated with CD274 expression.

[0049] In some embodiments of any of the foregoing or related aspects, the disease, disorder or condition associated with CD274 expression is cancer.

### BRIEF DESCRIPTION OF THE DRAWINGS

[0050] FIG. 1A provides the structure of an exemplary RNAi oligonucleotide molecule having chemical modifications with a C18 lipid conjugated to the stem-loop, referred to as “GalXC-CD274-C18”. A GalXC-CD274-C18 oligonucleotide specific for mouse Cd274 is indicated as “GalXC-mCD274-C18” throughout.

[0051] FIG. 1B provides structures of lipid tails suitable for conjugation to RNAi oligonucleotide molecules.

[0052] FIGS. 2A-2F are graphs demonstrating remaining mouse Cd274 mRNA in tumor microenvironment (TME) and tumor draining lymph node (TDLN) following subcutaneous treatment with 25 mg/kg of GalXC-mCD274-C18 RNAi oligonucleotide at Day 1 and Day 4 (q3dx2) in checkpoint resistant Pan02 murine pancreatic tumor (FIGS. 2A-2B), checkpoint inhibitor resistant 4T1 murine triple negative breast tumor (FIGS. 2C-2D), a checkpoint inhibitor partially sensitive MC-38 murine colorectal tumor (FIGS. 2E-2F), and checkpoint inhibitor sensitive Hepa1-6 hepatoma tumor (FIG. 2G) bearing mice. Tissue from the TME and TDLN was collected 7 days after the final administration of the RNAi oligonucleotide. Control mice were administered PBS.

[0053] FIG. 3 is a graph representing remaining mouse Aldh2 mRNA levels in Cd11b and Cd11c cells isolated from tumor draining lymph nodes of Pan02 tumor bearing mice following treatment with an RNAi oligonucleotide targeting ALDH2 (i.e, GalXC-ALDH2-C18) subcutaneously at 25 mg/kg. Tissue from the TDLN was collected 3 days after the administration of the RNAi oligonucleotide. Control mice were administered PBS.

[0054] FIGS. 4A-4B are images showing the treatment regimen and GalXC-Placebo-C18 molecule (FIG. 4A) used to treat mice bearing 4T1 tumors with GalXC-mCD274-C18 RNAi oligonucleotide or GalXC-Placebo-C18 subcutaneously at 25 mg/kg or anti-PD-L1 monoclonal antibody (mAb) intraperitoneally at 10 mg/kg. Mice were treated at Day 1 and Day 4, and 7 days after the final administration of the RNAi oligonucleotide or placebo TDLN was collected and processed for immunohistochemistry of CD11c and PD-L1 expression (FIG. 4B).

[0055] FIGS. 5A-5C are graphs demonstrating remaining mouse Cd274, Ifng, and Gzmb mRNA following treatment with GalXC-mCD274-C18 RNAi oligonucleotide or anti-PD-L1 mAb in TDLNs of Pan02 (FIG. 5A), 4T1 (FIG. 5B), or MC-38 (FIG. 5C) tumor bearing mice. Mice were administered either PBS or the RNAi oligonucleotide subcutaneously at 25 mg/kg for q3dx2 (administered Day 1 and Day 4), or anti-PD-L1 mAb intraperitoneally at 10 mg/kg for q3dx2. Tissue was collected 7 days following administration of the RNAi oligonucleotide or mAb.

[0056] FIG. 6 provides images of CD8 immunohistochemistry in tumor microenvironment (TME) of MC-38 xenograft tumors treated with GalXC-mCD274-C18 RNAi oligonucleotide or anti-PD-L1 mAb. Mice were administered either PBS or the RNAi oligonucleotide subcutaneously at 25 mg/kg at[q3dx2]×2 (administered Day 1, 4, 8 and 12), or anti-PD-L1 mAb intraperitoneally at 10 mg/kg for q3dx2. Tissue was collected 7 days following administration of the RNAi oligonucleotide or mAb.

[0057] FIG. 7 provides images of CD8 immunohistochemistry in tumor microenvironment (TME) of 4T1 xenograft tumors treated with GalXC-mCD274-C18 RNAi oligonucleotide or anti-PD-L1 monoclonal antibody (mAb). Mice were administered either PBS or the RNAi oligonucleotide subcutaneously at 25 mg/kg for q3dx2 (administered Day 1 and Day 4), or anti-PD-L1 mAb intraperitoneally at 10 mg/kg for q3dx2. Tissue was collected 7 days following administration of the RNAi oligonucleotide or mAb.

[0058] FIGS. 8A-8B are graphs showing the anti-tumor effect of subcutaneous treatment with GalXC-mCD274-C18 RNAi oligonucleotide or anti-PD-L1 mAb. Tumor volume was measured in immunocompetent mice bearing 4T1 (FIG. 8A) and Pan02 (FIG. 8B) tumors. Mice with Pan02 tumors were treated with four 25 mg/kg (q3dx2 per cycle per week) of the GalXC-CD274 conjugate or PBS or mice with 4T1 tumors were treated with three 50 mg/kg doses of GalXC-CD274 or GalXC-Placebo conjugate (q3dx3) and both of the tumors were treated with the same frequency but at 10 mg/kg of mAb.

[0059] FIGS. 9A-9B provide a graph measuring tumor volume (FIG. 9A) and lung metastasis tumor images (FIG. 9B) following treatment with i) GalXC-placebo-C18; or ii) anti-PD-L1 mAb; or, iii) GalXC-mCD274-C18. Immunocompromised mice with 4T1 xenograft tumors were administered GalXC-mCD274-C18 RNAi oligonucleotide subcutaneously at 25 mg/kg or anti-PDL1 mAb intraperitoneally at 10 mg/kg on day 14, 17, and 20. On day 24, the lungs of the mice were photographed to capture the lung metastasis

[0060] FIGS. 10A-10B provide a graph measuring tumor volume (FIG. 10A) and lung metastasis tumor images (FIG. 10B) following treatment with i) GalXC-placebo-C18; or ii) anti-PD-L1 mAb; or, iii) GalXC-mCD274-C18. Immunocompetent mice with 4T1 xenograft tumors were administered GalXC-mCD274-C18 RNAi oligonucleotide subcutaneously at 25 mg/kg or anti-PD-L1 mAb intraperitoneally at 10 mg/kg for on day 14, 17, and 20. On day 24, the lungs of the mice were photographed to capture the lung metastasis.

[0061] FIGS. 11A-11B are graphs showing the anti-tumor effect of subcutaneous treatment with GalXC-mCD274-C18 RNAi oligonucleotide or anti-PD-L1 mAb. Tumor volume was measured in immunocompetent mice bearing MC-38 murine colorectal tumors (FIG. 11A) and Hepa1-6 murine hepatocellular tumors (FIG. 11B). Mice were treated with four 25 mg/kg doses of conjugate at q3dx2 per cycle per week for 2 weeks and with the same dosing frequency but at 10 mg/kg of mAb. Doses were given on Day 11, 14, 18 and 21.

[0062] FIG. 12A is a graph showing tumor volume following combination of GalXC-mCD274-C18 RNAi oligonucleotide and anti-PD-L1 mAb. Mice with checkpoint inhibitor partially sensitive MC-38 tumors were administered GalXC-Placebo-C18, GalXC-Placebo-C18 with anti-PD-L1 antibody, GalXC-mCD274-C18, or GalXC-mCD274-C18 in combination with anti-PD-L1 mAb. GalXC-mCD274-C18 was administered subcutaneously at 25 mg/kg or anti-PD-L1 mAb intraperitoneally at 10 mg/kg on Days 8, 11, 15, and 18.

[0063] FIG. 12B provides images of perforin immunohistochemistry in tumors of mice with checkpoint inhibitor partially sensitive MC-38 tumors administered GalXC-Placebo-C18, GalXC-Placebo-C18 with anti-PD-L1 antibody, GalXC-mCD274-C18, or GalXC-mCD274-C18 in combination with anti-PD-L1 mAb. GalXC-mCD274-C18 was administered subcutaneously at 25 mg/kg or anti-PD-L1 mAb intraperitoneally at 10 mg/kg on Days 8, 11, 15, and 18.

[0064] FIG. 13A is a graph showing tumor volume following treatment with i) GalXC-placebo-C18; or ii) anti-PD-L1 mAb; or, iii) GalXC-mCD274-C18. Mice with checkpoint inhibitor resistant 4T1 tumors were administered GalXC-mCD274-C18 RNAi oligonucleotide subcutaneously at 25 mg/kg or anti-PD-L1 mAb intraperitoneally at 10 mg/kg for on Days 6, 9, and 12.

[0065] FIG. 13B is a graph showing tumor volume following combination of GalXC-CD274 RNAi oligonucleotide and anti-CTLA-4 mAb. Mice with checkpoint inhibitor resistant 4T1 tumors were administered GalXC-Placebo-C18, GalXC-Placebo-C18 with anti-CTLA-4 mAb, GalXC-mCD274-C18, or GalXC-mCD274-C18 in combination with anti-CTLA-4 mAb. GalXC-mCD274-C18 was administered subcutaneously at 25 mg/kg and anti-CTLA-4 intraperitoneally at 10 mg/kg on Days 8, 11, and 14.

[0066] FIG. 13C provides images of CD8⁺ immunohistochemistry in tumors of mice with checkpoint inhibitor resistant 4T1 tumors administered GalXC-Placebo-C18, GalXC-Placebo-C18 with anti-CTLA-4 mAb, GalXC-mCD274-C18, or GalXC-mCD274-C18 in combination with anti-CTLA-4 mAb. GalXC-mCD274-C18 was administered subcutaneously at 25 mg/kg and anti-CTLA-4 intraperitoneally at 10 mg/kg on Days 8, 11, and 14.

[0067] FIG. 14 is a graph depicting the percent (%) of human CD274 mRNA remaining in RKO (human colon carcinoma) cells endogenously expressing human CD274, after 28-hour treatment with 1 nM of GalNAc-CD274 oligonucleotides targeting various regions of the CD274 gene.

[0068] FIG. 15 is a graph depicting the percent (%) of human CD274 mRNA remaining in RKO cells endogenously expressing human CD274, after 28-hour treatment with 0.3 nM, 1 nM, or 3 nM of GalNAc-CD274 oligonucleotides targeting various regions of the CD274 gene. % mRNA remaining was normalized to HPRT and SFRS9 housekeeping genes and mock transfection control.

[0069] FIGS. 16A-16B provide graphs depicting the percent (%) of human CD274 mRNA remaining in liver of mice exogenously expressing human CD274 (hydrodynamic injection model) after treatment with GalNAc-conjugated CD274 oligonucleotides. Mice were dosed subcutaneously with 2 mg/kg of the indicated GalNAc-CD274 oligonucleotides formulated in PBS. Three days post-dose mice were hydrodynamically injected (HDI) with 50 μg/mouse of a DNA ORF plasmid encoding human CD274. The level of human CD274 mRNA was determined from livers collected 20 hours after injection.

[0070] FIG. 17 provides structures of RNAi oligonucleotide molecules having chemical modifications with GalNAc conjugated to the stem-loop.

[0071] FIG. 18 provides a graph depicting the dose response of GalNAc-conjugated CD274 oligonucleotides of FIG. 17. The percent (%) of human CD274 mRNA remaining in liver of mice exogenously expressing CD274 (HDI model) after subcutaneous treatment with human GalNAc-conjugated CD274 oligonucleotides at 2 doses (0.3 mg/kg or 1 mg/kg) was measured. Three days post-dose mice were hydrodynamically injected (HDI) with 50 μg/mouse of a DNA ORF plasmid encoding CD274. The level of human CD274 mRNA was determined from livers collected 24 hours later.

[0072] FIG. 19 provides a graph depicting the dose response of GalNAc-conjugated CD274 oligonucleotides of FIG. 17. The percent (%) of human CD274 mRNA remaining in liver of mice exogenously expressing CD274 (HDI model) after subcutaneous treatment with human GalNAc-conjugated CD274 oligonucleotides at 2 doses (0.1 mg/kg or 0.3 mg/kg) was measured. Three days post-dose mice were hydrodynamically injected (HDI) with 50 μg/mouse of a DNA ORF plasmid encoding CD274. The level of human CD274 mRNA was determined from livers collected 24 hours later.

[0073] FIG. 20 provides graphs depicting the percent (%) remaining human CD274 mRNA in H460 lung carcinoma cells endogenously expressing CD274 (reverse transfection for CD274 expression was performed overnight using lipofectamine RNAiMAX) treated with GalNAc-CD274-094 or GalNAc-CD274-098. H640 cells were treated for 24 hours with a series of dose levels (0.0032 nM, 0.16 nM, 0.08 nM, 0.04 nM, 2 nM, 10 nM, and 50 nM) of oligonucleotide to generate IC₅₀ curves.

[0074] FIG. 21 provides graphs depicting the percent (%) remaining human CD274 mRNA in human primary macrophages endogenously expressing CD274 (reverse transfection for CD274 expression was performed overnight using lipofectamine RNAiMAX) treated with GalNAc-CD274-094 or GalNAc-CD274-098. Human primary macrophages were polarized to M2 immunosuppressive phase with IL-10 cytokine and stimulated with lipopolysaccharide. Macrophages were treated for 72 hours with a series of dose levels (0.0032 nM, 0.16 nM, 0.08 nM, 0.04 nM, 2 nM, 10 nM, and 50 nM) of oligonucleotide to generate IC₅₀ curves.

[0075] FIG. 22 provides a graph depicting the percent (%) remaining human CD274 mRNA in DC immune cell culture expressing CD274 (reverse transfection for CD274 expression was performed overnight using lipofectamine RNAiMAX) treated with GalNAc-CD274-094 or GalNAc-CD274-098. Cells were first treated with suppressive cytokines IL-10 and treated for 72 hours with a series of doses (0.2 nM, 1 nM, and 5 nM) of oligonucleotide and percent (%) remaining of CD274 mRNA was plotted.

[0076] FIG. 23 provides a graph depicting the cytokine production associated with CD274 mRNA downregulation described in FIG. 22. Supernatants were collected from the plate and proinflammatory cytokine IFN-7 level was measured using MSD V-plex assay kit.

[0077] FIGS. 24A and 24B are graphs demonstrating remaining mouse Aldh2 mRNA from bulk tumor (FIG. 24A), and liver (FIG. 24B) of Pan02 xenografts. Mice were treated with 25 mg/kg of the specified GalXC-ALDH2-lipid conjugate and mRNA was measured on day 3.

[0078] FIGS. 24C and 24D are graphs demonstrating remaining mouse Aldh2 mRNA from bulk tumor (FIG. 24C) and tumor draining lymph node (TdLN) from mice with Pan02 xenografts on day 7 and day 14 after treatment with 25 mg/kg of the specified GalXC-ALDH2-lipid conjugate.

[0079] FIG. 25 provides the structure of an the CD274-0098 RNAi oligonucleotide molecule having chemical modifications with a C18 lipid conjugated to 5′ terminal nucleotide.

### DETAILED DESCRIPTION

[0080] Programmed death-ligand 1 (cluster of differentiation 274, CD274, or PD-L1) is a type I transmembrane inhibitory receptor ligand expressed on immune cells and some tumor cells. Interaction of the ligand with the PD-1 receptor inhibits T-cell activation and subsequent cytokine production. Expression in tumor cells provides an ability to evade the tumor response by repressing cytotoxic T-cell activation. Although tumoral PD-L1 has been widely used to identify patients most likely to respond to therapy, recent evidence suggests that PD-L1 expressed by immune cells, especially antigen presenting dendritic cells (APCs or CD11c expressing DCs), is a better biomarker to predict clinical response than PD-L1 expressed by tumor cells. Additionally, most research associated with PD-L1 and PD-1 has been focused on the extrinsic role of inhibiting the immune system, but more recently a tumor intrinsic role of PD-L1 was shown to be involved in certain cancer types (Wu, Y et al, Front. Immunol. 10:2022, 2019, Hudson, K et al, Front. Immunol. 11:568931, 2020). Intracellular PD-L1 expressed by APCs demonstrated a role in regulating DC migration from tumor to tumor draining lymph nodes. Lack of silencing of intracellular PD-L1 on DCs may impair the antigen presentation machinery in tumors and facilitate resistance to immunotherapy. Monoclonal antibodies (mAbs) are designed to mainly target extracellular/membranous PD-L1 and are unlikely to reach the intracellular version of PD-L1. Without wishing to be bound by theory, PD-L1 RNAi oligonucleotides conjugated with GalNAc or lipid moieties have the ability to inhibit both extracellular and intracellular PD-L1 and are effective to reduce PD-L1 expression for therapy. Thus, cells with membranous or extracellular PD-L1 are targetable by mAbs, but cells with intracellular and extracellular PD-L1 require therapies including the PD-L1 RNAi oligonucleotides described herein for inhibition of PD-L1.

[0081] According to some aspects, the disclosure provides oligonucleotides (e.g., RNAi oligonucleotides) that reduce CD274 expression in the tumor microenvironment. In some embodiments, the oligonucleotides provided herein are designed to treat diseases associated with CD274 expression in tumors. In some respects, the disclosure provides methods of treating a disease associated with overall CD274 expression by reducing CD274 expression in specific cells (e.g., tumor cells) or in organs.

### Oligonucleotide Inhibitors of CD274 Expression

### CD274 Target Sequences

[0082] In some embodiments, an oligonucleotide herein (e.g., an RNAi oligonucleotide) is targeted to a target sequence comprising a CD274 mRNA. In some embodiments, an oligonucleotide described herein is targeted to a target sequence within a CD274 mRNA sequence. In some embodiments, the oligonucleotide described herein corresponds to a target sequence within a CD274 mRNA sequence. In some embodiments, the oligonucleotide, or a portion, fragment, or strand thereof (e.g., an antisense strand or a guide strand of a double-stranded (ds) RNAi oligonucleotide) binds or anneals to a target sequence comprising CD274 mRNA, thereby inhibiting CD274 expression.

[0083] In some embodiments, the oligonucleotide is targeted to a CD274 target sequence for the purpose of inhibiting CD274 expression in vivo. In some embodiments, the amount or extent of inhibition of CD274 expression by an oligonucleotide targeted to a CD274 target sequence correlates with the potency of the oligonucleotide. In some embodiments, the amount or extent of inhibition of CD274 expression by an oligonucleotide targeted to a CD274 target sequence correlates with the amount or extent of therapeutic benefit in a subject or patient having a disease, disorder or condition associated with CD274 expression treated with the oligonucleotide.

[0084] Through examination of the nucleotide sequence of mRNAs encoding CD274, including mRNAs of multiple different species (e.g., human, cynomolgus monkey, and mouse; see, e.g., Example 7) and as a result of in vitro and in vivo testing (see, e.g., Examples 2-7), it has been discovered that certain nucleotide sequences of CD274 mRNA are more amenable than others to oligonucleotide-based inhibition and are thus useful as target sequences for the oligonucleotides herein. In some embodiments, a sense strand of an oligonucleotide (e.g., an RNAi oligonucleotide) described herein comprises a CD274 target sequence. In some embodiments, a portion or region of the sense strand of an oligonucleotide described herein (e.g., an RNAi oligonucleotide) comprises a CD274 target sequence. In some embodiments, a CD274 target sequence comprises, or consists of, a sequence of any one of SEQ ID NOs: 1-2 and 4-241. In some embodiments, a CD274 target sequence comprises, or consists of, the sequence set forth in SEQ ID NO: 2, 4, 5, 6, 7, 9, or 20. In some embodiments, a CD274 target sequence comprises, or consists of, the sequence set forth in SEQ ID NO: 2. In some embodiments, a CD274 target sequence comprises, or consists of, the sequence set forth in SEQ ID NO: 4. In some embodiments, a CD274 target sequence comprises, or consists of, the sequence set forth in SEQ ID NO: 5. In some embodiments, a CD274 target sequence comprises, or consists of, the sequence set forth in SEQ ID NO: 6. In some embodiments, a CD274 target sequence comprises, or consists of, the sequence set forth in SEQ ID NO: 7. In some embodiments, a CD274 target sequence comprises, or consists of, the sequence set forth in SEQ ID NO: 9. In some embodiments, a CD274 target sequence comprises, or consists of, the sequence set forth in SEQ ID NO: 20.

### CD274 Targeting Sequences

[0085] In some embodiments, the oligonucleotides herein (e.g., RNAi oligonucleotides) have regions of complementarity to CD274 mRNA (e.g., within a target sequence of CD274 mRNA) for purposes of targeting the CD274 mRNA in cells and inhibiting and/or reducing CD274 expression. In some embodiments, the oligonucleotides herein comprise a CD274 targeting sequence (e.g., an antisense strand or a guide strand of an RNAi oligonucleotide) having a region of complementarity that binds or anneals to a CD274 target sequence by complementary (Watson-Crick) base pairing. The targeting sequence or region of complementarity is generally of a suitable length and base content to enable binding or annealing of the oligonucleotide (or a strand thereof) to a CD274 mRNA for purposes of inhibiting and/or reducing CD274 expression. In some embodiments, the targeting sequence or region of complementarity is at least about 12, at least about 13, at least about 14, at least about 15, at least about 16, at least about 17, at least about 18, at least about 19, at least about 20, at least about 21, at least about 22, at least about 23, at least about 24, at least about 25, at least about 26, at least about 27, at least about 28, at least about 29 or at least about 30 nucleotides in length. In some embodiments, the targeting sequence or region of complementarity is about 12 to about 30 (e.g., 12 to 30, 12 to 22, 15 to 25, 17 to 21, 18 to 27, 19 to 27, or 15 to 30) nucleotides in length. In some embodiments, the targeting sequence or region of complementarity is about 12, 13, 14, 15, 16, 17, 18, 19, 20, 21, 22, 23, 24, 25, 26, 27, 28, 29 or 30 nucleotides in length. In some embodiments, the targeting sequence or region of complementarity is 18 nucleotides in length. In some embodiments, the targeting sequence or region of complementarity is 19 nucleotides in length. In some embodiments, the targeting sequence or region of complementarity is 20 nucleotides in length. In some embodiments, the targeting sequence or region of complementarity is 21 nucleotides in length. In some embodiments, the targeting sequence or region of complementarity is 22 nucleotides in length. In some embodiments, the targeting sequence or region of complementarity is 23 nucleotides in length. In some embodiments, the targeting sequence or region of complementarity is 24 nucleotides in length. In some embodiments, an oligonucleotide comprises a target sequence or region of complementarity complementary to a sequence of any one of SEQ ID NOs: 1-2 and 4-241, and the targeting sequence or region of complementarity is 18 nucleotides in length. In some embodiments, an oligonucleotide comprises a target sequence or region of complementarity complementary to a sequence of any one of SEQ ID NOs: 1-2 and 4-241, and the targeting sequence or region of complementarity is 19 nucleotides in length. In some embodiments, an oligonucleotide comprises a target sequence or region of complementarity complementary to a sequence of SEQ ID NO: 1037, and the targeting sequence or region of complementarity is 20 nucleotides in length. In some embodiments, an oligonucleotide comprises a target sequence or region of complementarity complementary to a sequence of SEQ ID NO: 1037, and the targeting sequence or region of complementarity is 21 nucleotides in length. In some embodiments, an oligonucleotide comprises a target sequence or region of complementarity complementary to a sequence of SEQ ID NO: 1037, and the targeting sequence or region of complementarity is 22 nucleotides in length. In some embodiments, an oligonucleotide comprises a target sequence or region of complementarity complementary to a sequence of SEQ ID NO: 1037, and the targeting sequence or region of complementarity is 23 nucleotides in length. In some embodiments, an oligonucleotide comprises a target sequence or region of complementarity complementary to a sequence of SEQ ID NO: 1037 and the targeting sequence or region of complementarity is 24 nucleotides in length.

[0086] In some embodiments, an oligonucleotide herein (e.g., an RNAi oligonucleotide) comprises a targeting sequence or a region of complementarity (e.g., an antisense strand or a guide strand of a double-stranded oligonucleotide) that is fully complementary to a CD274 target sequence. In some embodiments, the targeting sequence or region of complementarity is partially complementary to a CD274 target sequence. In some embodiments, the oligonucleotide comprises a targeting sequence or region of complementarity that is fully complementary to a CD274 target sequence. In some embodiments, the oligonucleotide comprises a targeting sequence or region of complementarity that is partially complementary to a CD274 target sequence.

[0087] In some embodiments, the oligonucleotide comprises a targeting sequence or region of complementarity that is fully complementary to a sequence of any one of SEQ ID NOs: 1-2 and 4-241. In some embodiments, the oligonucleotide comprises a targeting sequence or region of complementarity that is fully complementary to the sequence set forth in SEQ ID NOs: 2, 4, 5, 6, 7, 9, or 20. In some embodiments, the oligonucleotide comprises a targeting sequence or region of complementarity that is partially complementary to a sequence of any one of SEQ ID NOs: 1-2 and 4-241. In some embodiments, the oligonucleotide comprises a targeting sequence or region of complementarity that is partially complementary to the sequence set forth in SEQ ID NOs: 2, 4, 5, 6, 7, 9, or 20. Some embodiments, the oligonucleotide comprises a targeting sequence or region of complementarity that is partially complementary to the sequence set forth in SEQ ID NO: 2. In some embodiments, the oligonucleotide comprises a targeting sequence or region of complementarity that is partially complementary to the sequence set forth in SEQ ID NO: 5. In some embodiments, the oligonucleotide comprises a targeting sequence or region of complementarity that is partially complementary to the sequence set forth in SEQ ID NO: 9.

[0088] In some embodiments, an oligonucleotide herein (e.g., an RNAi oligonucleotide) comprises a targeting sequence or region of complementarity that is complementary to a contiguous sequence of nucleotides within a CD274 mRNA, wherein the contiguous sequence of nucleotides is about 12 to about 30 nucleotides in length (e.g., 12 to 30, 12 to 28, 12 to 26, 12 to 24, 12 to 20, 12 to 18, 12 to 16, 14 to 22, 16 to 20, 18 to 20 or 18 to 19 nucleotides in length). In some embodiments, the oligonucleotide comprises a targeting sequence or region of complementarity that is complementary to a contiguous sequence of nucleotides within a CD274 mRNA, wherein the contiguous sequence of nucleotides is 10, 11, 12, 13, 14, 15, 16, 17, 18, 19 or 20 nucleotides in length. In some embodiments, the oligonucleotide comprises a targeting sequence or region of complementarity that is complementary to a contiguous sequence of nucleotides within a CD274 mRNA, wherein the contiguous sequence of nucleotides is 19 nucleotides in length. In some embodiments, the oligonucleotide comprises a targeting sequence or region of complementarity that is complementary to a contiguous sequence of nucleotides within a CD274 mRNA, wherein the contiguous sequence of nucleotides is 20 nucleotides in length.

[0089] In some embodiments, an oligonucleotide herein (e.g., an RNAi oligonucleotide) comprises a targeting sequence or a region of complementary that is complementary to a contiguous sequence of nucleotides of any one of SEQ ID NOs: 2, 4, 5, 6, 7, 9, or 20, optionally wherein the contiguous sequence of nucleotides is 19 nucleotides in length. In some embodiments, an oligonucleotide herein (e.g., an RNAi oligonucleotide) comprises a targeting sequence or a region of complementary that is complementary to a contiguous sequence of nucleotides of SEQ ID NO: 2, optionally wherein the contiguous sequence of nucleotides is 19 nucleotides in length. In some embodiments, an oligonucleotide herein (e.g., an RNAi oligonucleotide) comprises a targeting sequence or a region of complementary that is complementary to a contiguous sequence of nucleotides of SEQ ID NO: 5, optionally wherein the contiguous sequence of nucleotides is 19 nucleotides in length. In some embodiments, an oligonucleotide herein (e.g., an RNAi oligonucleotide) comprises a targeting sequence or a region of complementary that is complementary to a contiguous sequence of nucleotides of SEQ ID NO: 9, optionally wherein the contiguous sequence of nucleotides is 19 nucleotides in length. In some embodiments, the oligonucleotide comprises a targeting sequence or a region of complementary that is complementary to a contiguous sequence of nucleotides of any one of SEQ ID NOs: 2, 4, 5, 6, 7, 9, or 20, wherein the contiguous sequence of nucleotides is 19 nucleotides in length. In some embodiments, the oligonucleotide comprises a targeting sequence or a region of complementary that is complementary to a contiguous sequence of nucleotides of SEQ ID NO: 2, wherein the contiguous sequence of nucleotides is 19 nucleotides in length. In some embodiments, the oligonucleotide comprises a targeting sequence or a region of complementary that is complementary to a contiguous sequence of nucleotides of SEQ ID NO: 5, wherein the contiguous sequence of nucleotides is 19 nucleotides in length. In some embodiments, the oligonucleotide comprises a targeting sequence or a region of complementary that is complementary to a contiguous sequence of nucleotides of SEQ ID NO: 9, wherein the contiguous sequence of nucleotides is 19 nucleotides in length. In some embodiments, the oligonucleotide comprises a targeting sequence or a region of complementary that is complementary to a contiguous sequence of nucleotides of SEQ ID NO: 1037, wherein the contiguous sequence of nucleotides is 20 nucleotides in length.

[0090] In some embodiments, an oligonucleotide herein (e.g., an RNAi oligonucleotide) comprises a targeting sequence or region of complementarity having one or more base pair (bp) mismatches with the corresponding CD274 target sequence. In some embodiments, the targeting sequence or region of complementarity may have up to about 1, up to about 2, up to about 3, up to about 4, up to about 5, etc. mismatches with the corresponding CD274 target sequence provided that the ability of the targeting sequence or region of complementarity to bind or anneal to the CD274 mRNA under appropriate hybridization conditions and/or the ability of the oligonucleotide to inhibit CD274 expression is maintained. Alternatively, the targeting sequence or region of complementarity may have no more than 1, no more than 2, no more than 3, no more than 4, or no more than 5 mismatches with the corresponding CD274 target sequence provided that the ability of the targeting sequence or region of complementarity to bind or anneal to the CD274 mRNA under appropriate hybridization conditions and/or the ability of the oligonucleotide to inhibit CD274 expression is maintained. In some embodiments, the oligonucleotide comprises a targeting sequence or region of complementarity having 1 mismatch with the corresponding target sequence. In some embodiments, the oligonucleotide comprises a targeting sequence or region of complementarity having 2 mismatches with the corresponding target sequence. In some embodiments, the oligonucleotide comprises a targeting sequence or region of complementarity having 3 mismatches with the corresponding target sequence. In some embodiments, the oligonucleotide comprises a targeting sequence or region of complementarity having 4 mismatches with the corresponding target sequence. In some embodiments, the oligonucleotide comprises a targeting sequence or region of complementarity having 5 mismatches with the corresponding target sequence. In some embodiments, the oligonucleotide comprises a targeting sequence or region of complementarity having more than one mismatch (e.g., 2, 3, 4, 5 or more mismatches) with the corresponding target sequence, wherein at least 2 (e.g., all) of the mismatches are positioned consecutively (e.g., 2, 3, 4, 5 or more mismatches in a row), or wherein the mismatches are interspersed throughout the targeting sequence or region of complementarity. In some embodiments, the oligonucleotide comprises a targeting sequence or region of complementarity having more than one mismatch (e.g., 2, 3, 4, 5 or more mismatches) with the corresponding target sequence, wherein at least 2 (e.g., all) of the mismatches are positioned consecutively (e.g., 2, 3, 4, 5 or more mismatches in a row), or wherein at least one or more non-mismatched base pair is located between the mismatches, or a combination thereof. In some embodiments, the oligonucleotide comprises a targeting sequence or a region of complementary that is complementary to a contiguous sequence of nucleotides of any one of SEQ ID NOs: 1-2 and 4-241, wherein the targeting sequence or region of complementarity may have up to about 1, up to about 2, up to about 3, up to about 4, up to about 5, etc. mismatches with the corresponding CD274 target sequence. In some embodiments, the oligonucleotide comprises a targeting sequence or a region of complementary that is complementary to a contiguous sequence of nucleotides of any one of SEQ ID NOs: 1-2 and 4-241, wherein the targeting sequence or region of complementarity may have no more than 1, no more than 2, no more than 3, no more than 4, or no more than 5 mismatches with the corresponding CD274 target sequence. In some embodiments, the oligonucleotide comprises a targeting sequence or a region of complementary that is complementary to a contiguous sequence of nucleotides of any one of SEQ ID NOs: 1-2 and 4-241, wherein the targeting sequence or region of complementarity may have up to about 1, up to about 2, up to about 3, up to about 4, up to about 5, etc. mismatches with the corresponding CD274 target sequence. In some embodiments, the oligonucleotide comprises a targeting sequence or a region of complementary that is complementary to a contiguous sequence of nucleotides of any one of SEQ ID NOs: 2, 4, 5, 6, 7, 9, or 20, wherein the targeting sequence or region of complementarity may have no more than 1, no more than 2, no more than 3, no more than 4, or no more than 5 mismatches with the corresponding CD274 target sequence.

### Types of Oligonucleotides

[0091] A variety of oligonucleotide types and/or structures are useful for targeting CD274 in the methods herein including, but not limited to, RNAi oligonucleotides, antisense oligonucleotides (ASOs), miRNAs, etc. Any of the oligonucleotide types described herein or elsewhere are contemplated for use as a framework to incorporate a CD274 targeting sequence herein for the purposes of inhibiting CD274 expression.

[0092] In some embodiments, the oligonucleotides herein inhibit CD274 expression by engaging with RNA interference (RNAi) pathways upstream or downstream of Dicer involvement. For example, RNAi oligonucleotides have been developed with each strand having sizes of about 19-25 nucleotides with at least one 3′ overhang of 1 to 5 nucleotides (see, e.g., U.S. Pat. No. 8,372,968). Longer oligonucleotides also have been developed that are processed by Dicer to generate active RNAi products (see, e.g., U.S. Pat. No. 8,883,996). Further work produced extended dsRNAs where at least one end of at least one strand is extended beyond a duplex targeting region, including structures where one of the strands includes a thermodynamically stabilizing tetraloop structure (see, e.g., U.S. Pat. Nos. 8,513,207 and 8,927,705, as well as Intl. Patent Application Publication No. WO 2010/033225). Such structures may include single-stranded (ss) extensions (on one or both sides of the molecule) as well as double-stranded (ds) extensions.

[0093] In some embodiments, the oligonucleotides herein engage with the RNAi pathway downstream of the involvement of Dicer (e.g., Dicer cleavage). In some embodiments, the oligonucleotides described herein are Dicer substrates. In some embodiments, upon endogenous Dicer processing, double-stranded nucleic acids of 19-23 nucleotides in length capable of reducing CD274 expression are produced. In some embodiments, the oligonucleotide has an overhang (e.g., of 1, 2, or 3 nucleotides in length) in the 3′ end of the antisense strand. In some embodiments, the oligonucleotide (e.g., siRNA) comprises a 21-nucleotide guide strand that is antisense to a target RNA and a complementary passenger strand, in which both strands anneal to form a 19-bp duplex and 2 nucleotide overhangs at either or both 3′ ends. Longer oligonucleotide designs also are available including oligonucleotides having a guide strand of 23 nucleotides and a passenger strand of 21 nucleotides, where there is a blunt end on the right side of the molecule (3′ end of passenger strand/5′ end of guide strand) and a two nucleotide 3′-guide strand overhang on the left side of the molecule (5′ end of the passenger strand/3′ end of the guide strand). In such molecules, there is a 21 bp duplex region. See, e.g., U.S. Pat. Nos. 9,012,138; 9,012,621 and 9,193,753.

[0094] In some embodiments, the oligonucleotides herein comprise sense and antisense strands that are both in the range of about 17 to 36 (e.g., 17 to 36, 20 to 25 or 21-23) nucleotides in length. In some embodiments, the oligonucleotides described herein comprise an antisense strand of 19-30 nucleotides in length and a sense strand of 19-50 nucleotides in length, wherein the antisense and sense strands are separate strands which form an asymmetric duplex region having an overhang of 1-4 nucleotides at the 3′ terminus of the antisense strand. In some embodiments, an oligonucleotide herein comprises a sense and antisense strand that are both in the range of about 19-22 nucleotides in length. In some embodiments, the sense and antisense strands are of equal length. In some embodiments, an oligonucleotide comprises sense and antisense strands, such that there is a 3′-overhang on either the sense strand or the antisense strand, or both the sense and antisense strand. In some embodiments, for oligonucleotides that have sense and antisense strands that are both in the range of about 21-23 nucleotides in length, a 3′ overhang on the sense, antisense, or both sense and antisense strands is 1 or 2 nucleotides in length. In some embodiments, the oligonucleotide has a guide strand of 22 nucleotides and a passenger strand of 20 nucleotides, where there is a blunt end on the right side of the molecule (3′ end of passenger strand/5′ end of guide strand) and a 2 nucleotide 3′-guide strand overhang on the left side of the molecule (5′ end of the passenger strand/3′ end of the guide strand). In such molecules, there is a 20 bp duplex region.

[0095] Other oligonucleotide designs for use with the compositions and methods herein include: 16-mer siRNAs (see, e.g., NUCLEIC ACIDS IN CHEMISTRY AND BIOLOGY, Blackburn (ed.), ROYAL SOCIETY OF CHEMISTRY, 2006), shRNAs (e.g., having 19 bp or shorter stems; see, e.g., Moore et al. (2010) METHODS MOL. BIOL. 629:141-158), blunt siRNAs (e.g., of 19 bps in length; see, e.g., Kraynack & Baker (2006) RNA 12:163-176), asymmetrical siRNAs (aiRNA; see, e.g., Sun et al. (2008) NAT. BIOTECHNOL. 26:1379-82), asymmetric shorter-duplex siRNA (see, e.g., Chang et al. (2009) MOL. THER. 17:725-32), fork siRNAs (see, e.g., Hohjoh (2004) FEBS LETT. 557:193-98), ss siRNAs (Elsner (2012) NAT. BIOTECHNOL. 30:1063), dumbbell-shaped circular siRNAs (see, e.g., Abe et al. (2007) J. AM. CHEM. SOC. 129:15108-09), and small internally segmented interfering RNA (siRNA; see, e.g., Bramsen et al. (2007) NUCLEIC ACIDS RES. 35:5886-97). Further non-limiting examples of an oligonucleotide structures that may be used in some embodiments to reduce or inhibit the expression of CD274 are microRNA (miRNA), short hairpin RNA (shRNA) and short siRNA (see, e.g., Hamilton et al. (2002) EMBO J. 21:4671-79; see also, US Patent Application Publication No. 2009/0099115).

[0096] Still, in some embodiments, an oligonucleotide for reducing or inhibiting CD274 expression herein is single-stranded (ss). Such structures may include but are not limited to single-stranded RNAi molecules. Recent efforts have demonstrated the activity of ss RNAi molecules (see, e.g., Matsui et al. (2016) MOL. THER. 24:946-55). However, in some embodiments, oligonucleotides herein are antisense oligonucleotides (ASOs). An antisense oligonucleotide is a single-stranded oligonucleotide that has a nucleobase sequence which, when written in the 5′ to 3′ direction, comprises the reverse complement of a targeted segment of a particular nucleic acid and is suitably modified (e.g., as a gapmer) to induce RnaseH-mediated cleavage of its target RNA in cells or (e.g., as a mixmer) so as to inhibit translation of the target mRNA in cells. ASOs for use herein may be modified in any suitable manner known in the art including, for example, as shown in U.S. Pat. No. 9,567,587 (including, e.g., length, sugar moieties of the nucleobase (pyrimidine, purine), and alterations of the heterocyclic portion of the nucleobase). Further, ASOs have been used for decades to reduce expression of specific target genes (see, e.g., Bennett et al. (2017) ANNU. REV. PHARMACOL. 57:81-105).

[0097] In some embodiments, the antisense oligonucleotide shares a region of complementarity with CD274 mRNA. In some embodiments, the antisense oligonucleotide targets various areas of the human CD274 gene identified as NM_014143.4. In some embodiments, the antisense oligonucleotide targets various areas of the cynomolgus monkey CD274 gene identified as XM_005581779.2. In some embodiments, the antisense oligonucleotide targets various areas of the mouse CD274 gene identified as NM_021893.3. In some embodiments, the antisense oligonucleotide is 15-50 nucleotides in length. In some embodiments, the antisense oligonucleotide is 15-25 nucleotides in length. In some embodiments, the antisense oligonucleotide is 22 nucleotides in length. In some embodiments, the antisense oligonucleotide is complementary to any one of SEQ ID NOs: 1-2 and 4-241. In some embodiments, the antisense oligonucleotide is at least 15 contiguous nucleotides in length. In some embodiments, the antisense oligonucleotide is at least 19 contiguous nucleotides in length. In some embodiments, the antisense oligonucleotide is at least 20 contiguous nucleotides in length. In some embodiments, the antisense oligonucleotide differs by 1, 2, or 3 nucleotides from the target sequence.

### Double-Stranded Oligonucleotides

[0098] In some aspects, the disclosure provides double-stranded (ds) RNAi oligonucleotides for targeting CD274 mRNA and inhibiting CD274 expression (e.g., via the RNAi pathway) comprising a sense strand (also referred to herein as a passenger strand) and an antisense strand (also referred to herein as a guide strand). In some embodiments, the sense strand and antisense strand are separate strands and are not covalently linked. In some embodiments, the sense strand and antisense strand are covalently linked. In some embodiments, the sense strand and antisense strand form a duplex region, wherein the sense strand and antisense strand, or a portion thereof, binds with one another in a complementary fashion (e.g., by Watson-Crick base pairing).

[0099] In some embodiments, the sense strand has a first region (R1) and a second region (R2), wherein R2 comprises a first subregion (S1), a tetraloop or triloop (L), and a second subregion (S2), wherein L is located between S1 and S2, and wherein S1 and S2 form a second duplex (D2). D2 may have various length. In some embodiments, D2 is about 1-6 bp in length. In some embodiments, D2 is 2-6, 3-6, 4-6, 5-6, 1-5, 2-5, 3-5 or 4-5 bp in length. In some embodiments, D2 is 1, 2, 3, 4, 5 or 6 bp in length. In some embodiments, D2 is 6 bp in length.

[0100] In some embodiments, R1 of the sense strand and the antisense strand form a first duplex (D1). In some embodiments, D1 is at least about 15 (e.g., at least 15, at least 16, at least 17, at least 18, at least 19, at least 20 or at least 21) nucleotides in length. In some embodiments, D1 is in the range of about 12 to 30 nucleotides in length (e.g., 12 to 30, 12 to 27, 15 to 22, 18 to 22, 18 to 25, 18 to 27, 18 to 30 or 21 to 30 nucleotides in length). In some embodiments, D1 is at least 12 nucleotides in length (e.g., at least 12, at least 15, at least 20, at least 25, or at least 30 nucleotides in length). In some embodiments, D1 is 12, 13, 14, 15, 16, 17, 18, 19, 20, 21, 22, 23, 24, 25, 26, 27, 28, 29 or 30 nucleotides in length. In some embodiments, D1 is 20 nucleotides in length. In some embodiments, D1 comprising sense strand and antisense strand does not span the entire length of the sense strand and/or antisense strand. In some embodiments, D1 comprising the sense strand and antisense strand spans the entire length of either the sense strand or antisense strand or both. In certain embodiments, D1 comprising the sense strand and antisense strand spans the entire length of both the sense strand and the antisense strand.

[0101] In some embodiments, an oligonucleotide provided herein comprises a sense strand having a sequence of any one of SEQ ID NOs: 1-2 and 4-241 and an antisense strand comprising a complementary sequence selected from SEQ ID NOs: 242-243 and 245-482. In some embodiments, an oligonucleotide provided herein comprises a sense strand having a sequence of SEQ ID NO: 2, and an antisense strand comprising a complementary sequence of SEQ ID NO: 245. In some embodiments, an oligonucleotide provided herein comprises a sense strand having a sequence of SEQ ID NO: 5, and an antisense strand comprising a complementary sequence of SEQ ID NO: 246. In some embodiments, an oligonucleotide provided herein comprises a sense strand having a sequence of SEQ ID NO: 9, and an antisense strand comprising a complementary sequence of SEQ ID NO: 250.

[0102] In some embodiments, an oligonucleotide provided herein (e.g., an RNAi oligonucleotide) comprises a sense strand having a sequence of any one of SEQ ID NOs: 483-484 and 486-723 and an antisense strand comprising a complementary sequence selected from SEQ ID NOs: 724-725 and 727-964.

[0103] In some embodiments, an oligonucleotide provided herein (e.g., an RNAi oligonucleotide) comprises a sense strand and an antisense strand comprising nucleotide sequences selected from:
[0104] (a) SEQ ID NOs: 483 and 724, respectively;
[0105] (b) SEQ ID NOs: 484 and 725, respectively;
[0106] (c) SEQ ID NOs: 486 and 727, respectively;
[0107] (d) SEQ ID NOs: 487 and 728, respectively;
[0108] (e) SEQ ID NOs: 488 and 729, respectively;
[0109] (f) SEQ ID NOs: 489 and 730, respectively;
[0110] (g) SEQ ID NOs: 490 and 731, respectively;
[0111] (h) SEQ ID NOs: 492 and 733, respectively;
[0112] (i) SEQ ID NOs: 493 and 734, respectively;
[0113] (j) SEQ ID NOs: 494 and 735, respectively;
[0114] (k) SEQ ID NOs: 495 and 736, respectively;
[0115] (l) SEQ ID NOs: 496 and 737, respectively;
[0116] (m) SEQ ID NOs: 497 and 738, respectively;
[0117] (n) SEQ ID NOs: 498 and 739, respectively;
[0118] (o) SEQ ID NOs: 499 and 740, respectively;
[0119] (p) SEQ ID NOs: 500 and 741, respectively;
[0120] (q) SEQ ID NOs: 501 and 742, respectively;
[0121] (r) SEQ ID NOs: 502 and 743, respectively;
[0122] (s) SEQ ID NOs: 503 and 744, respectively;
[0123] (t) SEQ ID NOs: 504 and 745, respectively;
[0124] (u) SEQ ID NOs: 505 and 746, respectively;
[0125] (v) SEQ ID NOs: 506 and 747, respectively;
[0126] (w) SEQ ID NOs: 507 and 748, respectively;
[0127] (x) SEQ ID NOs: 508 and 749, respectively;
[0128] (y) SEQ ID NOs: 509 and 750, respectively;
[0129] (z) SEQ ID NOs: 510 and 751, respectively;
[0130] (aa) SEQ ID NOs: 511 and 752, respectively;
[0131] (bb) SEQ ID NOs: 512 and 753, respectively;
[0132] (cc) SEQ ID NOs: 513 and 754, respectively;
[0133] (dd) SEQ ID NOs: 514 and 755, respectively;
[0134] (ee) SEQ ID NOs: 515 and 756, respectively;
[0135] (ff) SEQ ID NOs: 516 and 757, respectively;
[0136] (gg) SEQ ID NOs: 517 and 758, respectively;
[0137] (hh) SEQ ID NOs: 518 and 758, respectively; and,
[0138] (ii) SEQ ID NOs: 491 and 732, respectively.

[0139] In some embodiments, an oligonucleotide provided herein (e.g., an RNAi oligonucleotide) comprises a sense strand and an antisense strand comprising nucleotide sequences selected from:
[0140] (a) SEQ ID NOs: 484 and 725, respectively;
[0141] (b) SEQ ID NOs: 486 and 727, respectively;
[0142] (c) SEQ ID NOs: 487 and 728, respectively;
[0143] (d) SEQ ID NOs: 488 and 729, respectively;
[0144] (e) SEQ ID NOs: 489 and 730, respectively;
[0145] (f) SEQ ID NOs: 491 and 732, respectively; and,
[0146] (g) SEQ ID NOs: 502 and 743, respectively.

[0147] In some embodiments, the sense strand comprises the sequence of SEQ ID NO: 484 and the antisense strand comprises the sequence of SEQ ID NO: 725. In some embodiments, the sense strand comprises the sequence of SEQ ID NO: 486 and the antisense strand comprises the sequence of SEQ ID NO: 727. In some embodiments, the sense strand comprises the sequence of SEQ ID NO: 487 and the antisense strand comprises the sequence of SEQ ID NO: 728. In some embodiments, the sense strand comprises the sequence of SEQ ID NO: 488 and the antisense strand comprises the sequence of SEQ ID NO: 729. In some embodiments, the sense strand comprises the sequence of SEQ ID NO: 489 and the antisense strand comprises the sequence of SEQ ID NO: 730. In some embodiments, the sense strand comprises the sequence of SEQ ID NO: 491 and the antisense strand comprises the sequence of SEQ ID NO: 732. In some embodiments, the sense strand comprises the sequence of SEQ ID NO: 502 and the antisense strand comprises the sequence of SEQ ID NO: 743.

[0148] It should be appreciated that, in some embodiments, sequences presented in the Sequence Listing may be referred to in describing the structure of an oligonucleotide (e.g., an RNAi oligonucleotide) or other nucleic acid. In such embodiments, the actual oligonucleotide or other nucleic acid may have one or more alternative nucleotides (e.g., an RNA counterpart of a DNA nucleotide or a DNA counterpart of an RNA nucleotide) and/or one or more modified nucleotides and/or one or more modified internucleotide linkages and/or one or more other modification when compared with the specified sequence while retaining essentially same or similar complementary properties as the specified sequence.

[0149] In some embodiments, an oligonucleotide herein (e.g., an RNAi oligonucleotide) comprises a 25-nucleotide sense strand and a 27-nucleotide antisense strand that when acted upon by a Dicer enzyme results in an antisense strand that is incorporated into the mature RISC. In some embodiments, the 25-nucleotide sense strand comprises a sequence selected from SEQ ID NOs: 1-2 and 4-241. In some embodiments, the 27-nucleotide antisense strand comprises a sequence selected from SEQ ID NOs: 242-243 and 245-482. In some embodiments, the sense strand of the oligonucleotide is longer than 27 nucleotides (e.g., 28, 29, 30, 31, 32, 33, 34, 35, 36, 37, 38, 39, 40, 41, 42, 43, 44, 45, 46, 47, 48, 49 or 50 nucleotides). In some embodiments, the sense strand of the oligonucleotide is longer than 25 nucleotides (e.g., 26, 27, 28, 29 or 30 nucleotides). In some embodiments, the sense strand of the oligonucleotide comprises a nucleotide sequence selected from SEQ ID NOs: 483-484 and 486-723, wherein the nucleotide sequence is longer than 27 nucleotides (e.g., 28, 29, 30, 31, 32, 33, 34, 35, 36, 37, 38, 39, 40, 41, 42, 43, 44, 45, 46, 47, 48, 49 or 50 nucleotides). In some embodiments, the sense strand of the oligonucleotide comprises a nucleotide sequence selected from SEQ ID NOs: 483-484 and 486-723, wherein the nucleotide sequence is longer than 25 nucleotides (e.g., 26, 27, 28, 29 or 30 nucleotides).

[0150] In some embodiments, oligonucleotides herein (e.g., RNAi oligonucleotides) have one 5′ end that is thermodynamically less stable when compared to the other 5′ end. In some embodiments, an asymmetric oligonucleotide is provided that includes a blunt end at the 3′ end of a sense strand and a 3′-overhang at the 3′ end of an antisense strand. In some embodiments, the 3′-overhang on the antisense strand is about 1-8 nucleotides in length (e.g., 1, 2, 3, 4, 5, 6, 7 or 8 nucleotides in length). In some embodiments, the oligonucleotide has an overhang comprising two (2) nucleotides on the 3′ end of the antisense (guide) strand. However, other overhangs are possible. In some embodiments, an overhang is a 3′-overhang comprising a length of between 1 and 6 nucleotides, optionally 1 to 5, 1 to 4, 1 to 3, 1 to 2, 2 to 6, 2 to 5, 2 to 4, 2 to 3, 3 to 6, 3 to 5, 3 to 4, 4 to 6, 4 to 5, 5 to 6 nucleotides, or 1, 2, 3, 4, 5 or 6 nucleotides. However, in some embodiments, the overhang is a 5′-overhang comprising a length of between 1 and 6 nucleotides, optionally 1 to 5, 1 to 4, 1 to 3, 1 to 2, 2 to 6, 2 to 5, 2 to 4, 2 to 3, 3 to 6, 3 to 5, 3 to 4, 4 to 6, 4 to 5, 5 to 6 nucleotides, or 1, 2, 3, 4, 5 or 6 nucleotides. In some embodiments, the oligonucleotide comprises a targeting sequence or a region of complementary that is complementary to a contiguous sequence of nucleotides of any one of SEQ ID NOs: 1-2 and 4-241, and a 5′-overhang comprising a length of between 1 and 6 nucleotides. In some embodiments, the oligonucleotide comprises a sense strand comprising a nucleotide sequence selected from SEQ ID NOs: 483-484 and 486-723, wherein the oligonucleotide comprises a 5′-overhang comprising a length of between 1 and 6 nucleotides. In some embodiments, the oligonucleotide comprises an antisense strand comprising a nucleotide sequence selected from SEQ ID NOs: 724-725 and 727-964, wherein the oligonucleotide comprises a 5′-overhang comprising a length of between 1 and 6 nucleotides. In some embodiments, the oligonucleotide comprises a sense strand comprising a nucleotide sequence selected from SEQ ID NOs: 483-484 and 486-723 and antisense strand comprising a nucleotide sequence selected from SEQ ID NOs: 724-725 and 727-964, wherein the oligonucleotide comprises a 5′-overhang comprising a length of between 1 and 6 nucleotides.

[0151] In some embodiments, two (2) terminal nucleotides on the 3′ end of an antisense strand are modified. In some embodiments, the two (2) terminal nucleotides on the 3′ end of the antisense strand are complementary with the target mRNA (e.g., CD274 mRNA). In some embodiments, the two (2) terminal nucleotides on the 3′ end of the antisense strand are not complementary with the target mRNA. In some embodiments, the two (2) terminal nucleotides on the 3′ end of the antisense strand of an oligonucleotide herein are unpaired. In some embodiments, the two (2) terminal nucleotides on the 3′ end of the antisense strand of an oligonucleotide herein comprise unpaired purines or pyrimidines. In some embodiments, the two (2) terminal nucleotides on the 3′ end of the antisense strand of an oligonucleotide herein comprise unpaired purines. In some embodiments, the two (2) terminal nucleotides on the 3′ end of the antisense strand of an oligonucleotide herein comprise unpaired GG, AA, AG, or GA. In some embodiments, the two (2) terminal nucleotides on the 3′ end of the antisense strand of an oligonucleotide herein comprise an unpaired GG. In some embodiments, one or both of the two (2) terminal GG nucleotides on each 3′ end of an oligonucleotide herein is not complementary with the target mRNA. In some embodiments, the oligonucleotide comprises a targeting sequence or a region of complementary that is complementary to a contiguous sequence of nucleotides of any one of SEQ ID NOs: 1-2 and 4-241, wherein the two (2) terminal nucleotides on the 3′ end of the antisense strand of the oligonucleotide herein comprises an unpaired GG. In some embodiments, the oligonucleotide comprises an antisense strand comprising a nucleotide sequence selected from SEQ ID NOs: 242-243 and 245-482, wherein the two (2) terminal nucleotides on the 3′ end of the antisense strand of the oligonucleotide comprises an unpaired GG. In some embodiments, the oligonucleotide comprises a sense strand comprising a nucleotide sequence selected from SEQ ID NOs: 483-484 and 486-723 and antisense strand comprising a nucleotide sequence selected from SEQ ID NOs: 724-725 and 727-964, wherein the two (2) terminal nucleotides on the 3′ end of the antisense strand of the oligonucleotide comprises an unpaired GG.

[0152] In some embodiments, there is one or more (e.g., 1, 2, 3, 4 or 5) mismatch(s) between a sense and antisense strand comprising an oligonucleotide herein (e.g., an RNAi oligonucleotide). If there is more than one mismatch between a sense and antisense strand, they may be positioned consecutively (e.g., 2, 3 or more in a row), or interspersed throughout the region of complementarity. In some embodiments, the 3′ end of the sense strand comprises one or more mismatches. In some embodiments, two (2) mismatches are incorporated at the 3′ end of the sense strand. In some embodiments, base mismatches, or destabilization of segments at the 3′ end of the sense strand of an oligonucleotide herein improves or increases the potency of the oligonucleotide. In some embodiments, the sense and antisense strands of an oligonucleotide herein comprise nucleotides sequences selected from the group consisting of:
[0153] (a) SEQ ID NOs: 483 and 724, respectively;
[0154] (b) SEQ ID NOs: 484 and 725, respectively;
[0155] (c) SEQ ID NOs: 486 and 727, respectively;
[0156] (d) SEQ ID NOs: 487 and 728, respectively;
[0157] (e) SEQ ID NOs: 488 and 729, respectively;
[0158] (f) SEQ ID NOs: 489 and 730, respectively;
[0159] (g) SEQ ID NOs: 490 and 731, respectively;
[0160] (h) SEQ ID NOs: 492 and 733, respectively;
[0161] (i) SEQ ID NOs: 493 and 734, respectively;
[0162] (j) SEQ ID NOs: 494 and 735, respectively;
[0163] (k) SEQ ID NOs: 495 and 736, respectively;
[0164] (l) SEQ ID NOs: 496 and 737, respectively;
[0165] (m) SEQ ID NOs: 497 and 738, respectively;
[0166] (n) SEQ ID NOs: 498 and 739, respectively;
[0167] (o) SEQ ID NOs: 499 and 740, respectively;
[0168] (p) SEQ ID NOs: 500 and 741, respectively;
[0169] (q) SEQ ID NOs: 501 and 742, respectively;
[0170] (r) SEQ ID NOs: 502 and 743, respectively;
[0171] (s) SEQ ID NOs: 503 and 744, respectively;
[0172] (t) SEQ ID NOs: 504 and 745, respectively;
[0173] (u) SEQ ID NOs: 505 and 746, respectively;
[0174] (v) SEQ ID NOs: 506 and 747, respectively;
[0175] (w) SEQ ID NOs: 507 and 748, respectively;
[0176] (x) SEQ ID NOs: 508 and 749, respectively;
[0177] (y) SEQ ID NOs: 509 and 750, respectively;
[0178] (z) SEQ ID NOs: 510 and 751, respectively;
[0179] (aa) SEQ ID NOs: 511 and 752, respectively;
[0180] (bb) SEQ ID NOs: 512 and 753, respectively;
[0181] (cc) SEQ ID NOs: 513 and 754, respectively;
[0182] (dd) SEQ ID NOs: 514 and 755, respectively;
[0183] (ee) SEQ ID NOs: 515 and 756, respectively;
[0184] (ff) SEQ ID NOs: 516 and 757, respectively;
[0185] (gg) SEQ ID NOs: 517 and 758, respectively;
[0186] (hh) SEQ ID NOs: 518 and 758, respectively; and,
[0187] (ii) SEQ ID NOs: 491 and 732, respectively,
   wherein there is one or more (e.g., 1, 2, 3, 4 or 5) mismatch(s) between the sense and antisense strands.

[0188] In some embodiments, an oligonucleotide provided herein (e.g., an RNAi oligonucleotide) comprises a sense strand and an antisense strand comprising nucleotide sequences selected from the group consisting of:
[0189] (a) SEQ ID NOs: 484 and 725, respectively;
[0190] (b) SEQ ID NOs: 486 and 727, respectively;
[0191] (c) SEQ ID NOs: 487 and 728, respectively;
[0192] (d) SEQ ID NOs: 488 and 729, respectively;
[0193] (e) SEQ ID NOs: 489 and 730, respectively;
[0194] (f) SEQ ID NOs: 491 and 732, respectively; and,
[0195] (g) SEQ ID NOs: 502 and 743, respectively,
[0196] wherein there is one or more (e.g., 1, 2, 3, 4 or 5) mismatch(s) between the sense and antisense strands.

[0197] In some embodiments, an oligonucleotide provided herein (e.g., an RNAi oligonucleotide) comprises a sense strand and an antisense strand comprising nucleotide sequences of:
[0198] (a) SEQ ID NOs: 484 and 725, respectively;
[0199] (b) SEQ ID NOs: 487 and 728, respectively; and,
[0200] (b) SEQ ID NOs: 491 and 732, respectively,
[0201] wherein there is one or more (e.g., 1, 2, 3, 4 or 5) mismatch(s) between the sense and antisense strands.

### Antisense Strands

[0202] In some embodiments, an antisense strand of an oligonucleotide herein (e.g., an RNAi oligonucleotide) is referred to as a “guide strand”. For example, an antisense strand that engages with RNA-induced silencing complex (RISC) and binds to an Argonaute protein such as Ago2, or engages with or binds to one or more similar factors, and directs silencing of a target gene, as the antisense strand is referred to as a guide strand. In some embodiments, a sense strand comprising a region of complementary to a guide strand is referred to herein as a “passenger strand.”

[0203] In some embodiments, an oligonucleotide herein (e.g., an RNAi oligonucleotide) comprises an antisense strand of up to about 50 nucleotides in length (e.g., up to 50, up to 40, up to 35, up to 30, up to 27, up to 25, up to 21, up to 19, up to 17 or up to 12 nucleotides in length).

[0204] In some embodiments, an oligonucleotide comprises an antisense strand of at least about 12 nucleotides in length (e.g., at least 12, at least 15, at least 19, at least 21, at least 22, at least 25, at least 27, at least 30, at least 35 or at least 38 nucleotides in length). In some embodiments, an oligonucleotide comprises an antisense strand in a range of about 12 to about 40 (e.g., 12 to 40, 12 to 36, 12 to 32, 12 to 28, 15 to 40, 15 to 36, 15 to 32, 15 to 28, 17 to 22, 17 to 25, 19 to 27, 19 to 30, 20 to 40, 22 to 40, 25 to 40 or 32 to 40) nucleotides in length. In some embodiments, an oligonucleotide comprises antisense strand of 15 to 30 nucleotides in length. In some embodiments, an antisense strand of any one of the oligonucleotides disclosed herein is of 12, 13, 14, 15, 16, 17, 18, 19, 20, 21, 22, 23, 24, 25, 26, 27, 28, 29, 30, 31, 32, 33, 34, 35, 36, 37, 38, 39 or 40 nucleotides in length. In some embodiments, an oligonucleotide comprises an antisense strand of 22 nucleotides in length.

[0205] In some embodiments, an oligonucleotide disclosed herein (e.g., an RNAi oligonucleotide) for targeting CD274 comprises an antisense strand comprising or consisting of a sequence as set forth in any one of SEQ ID NOs: 242-243 and 245-482. In some embodiments, an oligonucleotide disclosed herein (e.g., an RNAi oligonucleotide) for targeting CD274 comprises an antisense strand comprising or consisting of a sequence as set forth in SEQ ID NO: 243. In some embodiments, an oligonucleotide disclosed herein (e.g., an RNAi oligonucleotide) for targeting CD274 comprises an antisense strand comprising or consisting of a sequence as set forth in SEQ ID NO: 246. In some embodiments, an oligonucleotide disclosed herein (e.g., an RNAi oligonucleotide) for targeting CD274 comprises an antisense strand comprising or consisting of a sequence as set forth in SEQ ID NO: 250. In some embodiments, an oligonucleotide herein comprises an antisense strand comprising at least about 12 (e.g., at least 12, at least 13, at least 14, at least 15, at least 16, at least 17, at least 18, at least 19, at least 20, at least 21, at least 22 or at least 23) contiguous nucleotides of a sequence as set forth in any one of SEQ ID NOs: 242-243 and 245-482. In some embodiments, an oligonucleotide herein comprises an antisense strand comprising at least about 12 (e.g., at least 12, at least 13, at least 14, at least 15, at least 16, at least 17, at least 18, at least 19, at least 20, at least 21, at least 22 or at least 23) contiguous nucleotides of a sequence as set forth in SEQ ID NO: 243. In some embodiments, an oligonucleotide herein comprises an antisense strand comprising at least about 12 (e.g., at least 12, at least 13, at least 14, at least 15, at least 16, at least 17, at least 18, at least 19, at least 20, at least 21, at least 22 or at least 23) contiguous nucleotides of a sequence as set forth in SEQ ID NO: 246. In some embodiments, an oligonucleotide herein comprises an antisense strand comprising at least about 12 (e.g., at least 12, at least 13, at least 14, at least 15, at least 16, at least 17, at least 18, at least 19, at least 20, at least 21, at least 22 or at least 23) contiguous nucleotides of a sequence as set forth in SEQ ID NO: 250. In some embodiments, an oligonucleotide disclosed herein for targeting CD274 comprises an antisense strand comprising or consisting of a sequence as set forth in any one of SEQ ID NOs: 724-725 and 727-964. In some embodiments, an oligonucleotide herein comprises an antisense strand comprising at least about 12 (e.g., at least 12, at least 13, at least 14, at least 15, at least 16, at least 17, at least 18, at least 19, at least 20, at least 21, at least 22 or at least 23) contiguous nucleotides of a sequence as set forth in any one of SEQ ID NOs: 724-725 and 727-964. In some embodiments, an oligonucleotide disclosed herein for targeting CD274 comprises an antisense strand comprising or consisting of a sequence as set forth in any one of SEQ ID NOs: 724-725 and 727-964. In some embodiments, an oligonucleotide herein comprises an antisense strand comprising at least about 12 (e.g., at least 12, at least 13, at least 14, at least 15, at least 16, at least 17, at least 18, at least 19, at least 20, at least 21, at least 22 or at least 23) contiguous nucleotides of a sequence as set forth in any one of SEQ ID NOs: 725, 727, 728, 729, 730, 732, and 743. In some embodiments, an oligonucleotide herein comprises an antisense strand comprising at least about 12 (e.g., at least 12, at least 13, at least 14, at least 15, at least 16, at least 17, at least 18, at least 19, at least 20, at least 21, at least 22 or at least 23) contiguous nucleotides of a sequence as set forth in SEQ ID NO: 725. In some embodiments, an oligonucleotide herein comprises an antisense strand comprising at least about 12 (e.g., at least 12, at least 13, at least 14, at least 15, at least 16, at least 17, at least 18, at least 19, at least 20, at least 21, at least 22 or at least 23) contiguous nucleotides of a sequence as set forth in SEQ ID NO: 728. In some embodiments, an oligonucleotide herein comprises an antisense strand comprising at least about 12 (e.g., at least 12, at least 13, at least 14, at least 15, at least 16, at least 17, at least 18, at least 19, at least 20, at least 21, at least 22 or at least 23) contiguous nucleotides of a sequence as set forth in SEQ ID NO: 732. In some embodiments, an oligonucleotide disclosed herein for targeting CD274 comprises an antisense strand comprising or consisting of a sequence as set forth in any one of SEQ ID NOs: 725, 727, 728, 729, 730, 732, and 743. In some embodiments, an oligonucleotide disclosed herein for targeting CD274 comprises an antisense strand comprising or consisting of a sequence as set forth in SEQ ID NO: 725. In some embodiments, an oligonucleotide disclosed herein for targeting CD274 comprises an antisense strand comprising or consisting of a sequence as set forth in SEQ ID NO: 728. In some embodiments, an oligonucleotide disclosed herein for targeting CD274 comprises an antisense strand comprising or consisting of a sequence as set forth in SEQ ID NO: 732.

[0206] In some embodiments, an oligonucleotide herein comprises an antisense strand comprising a nucleotide sequence selected from SEQ ID NOs: 242-243 and 245-482. In some embodiments, an oligonucleotide herein comprises an antisense strand comprising a nucleotide sequence selected from SEQ ID NOs: 243, 245, 246, 247, 248, 250, or 261. In some embodiments, an oligonucleotide herein comprises an antisense strand comprising a nucleotide sequence of SEQ ID NO: 243. In some embodiments, an oligonucleotide herein comprises an antisense strand comprising a nucleotide sequence of SEQ ID NO: 246. In some embodiments, an oligonucleotide herein comprises an antisense strand comprising a nucleotide sequence of SEQ ID NO: 250.

### Sense Strands

[0207] In some embodiments, an oligonucleotide disclosed herein (e.g., an RNAi oligonucleotide) for targeting CD274 mRNA and inhibiting CD274 expression comprises a sense strand sequence as set forth in any one of SEQ ID NOs: 1-2 and 4-241. In some embodiments, an oligonucleotide herein has a sense strand comprised of at least about 12 (e.g., at least 13, at least 14, at least 15, at least 16, at least 17, at least 18, or at least 19) contiguous nucleotides of a sequence as set forth in in any one of SEQ ID NOs: 1-2 and 4-241. In some embodiments, an oligonucleotide disclosed herein for targeting CD274 mRNA and inhibiting CD274 expression comprises a sense strand sequence as set forth in any one of SEQ ID NOs: 483-484 and 486-723. In some embodiments, an oligonucleotide herein has a sense strand comprised of least about 12 (e.g., at least 13, at least 14, at least 15, at least 16, at least 17, at least 18, at least 19, at least 20, at least 21, at least 22 or at least 23) contiguous nucleotides of a sequence as set forth in any one of SEQ ID NOs: 483-484 and 486-723. In some embodiments, an oligonucleotide disclosed herein for targeting CD274 mRNA and inhibiting CD274 expression comprises a sense strand sequence as set forth in any one of SEQ ID NOs: 484, 486, 487, 488, 489, 491, and 502. In some embodiments, an oligonucleotide disclosed herein for targeting CD274 mRNA and inhibiting CD274 expression comprises a sense strand sequence as set forth in SEQ ID NO: 484. In some embodiments, an oligonucleotide disclosed herein for targeting CD274 mRNA and inhibiting CD274 expression comprises a sense strand sequence as set forth in SEQ ID NO: 487. In some embodiments, an oligonucleotide disclosed herein for targeting CD274 mRNA and inhibiting CD274 expression comprises a sense strand sequence as set forth in SEQ ID NO: 491. In some embodiments, an oligonucleotide herein has a sense strand that comprise at least about 12 (e.g., at least 13, at least 14, at least 15, at least 16, at least 17, at least 18, at least 19, at least 20, at least 21, at least 22 or at least 23) contiguous nucleotides of a sequence as set forth in any one of SEQ ID NOs: 484, 486, 487, 488, 489, 491, and 502. In some embodiments, an oligonucleotide herein has a sense strand that comprise at least about 12 (e.g., at least 13, at least 14, at least 15, at least 16, at least 17, at least 18, at least 19, at least 20, at least 21, at least 22 or at least 23) contiguous nucleotides of a sequence as set forth in SEQ ID NO: 484. In some embodiments, an oligonucleotide herein has a sense strand that comprise at least about 12 (e.g., at least 13, at least 14, at least 15, at least 16, at least 17, at least 18, at least 19, at least 20, at least 21, at least 22 or at least 23) contiguous nucleotides of a sequence as set forth in SEQ ID NO: 487. In some embodiments, an oligonucleotide herein has a sense strand that comprise at least about 12 (e.g., at least 13, at least 14, at least 15, at least 16, at least 17, at least 18, at least 19, at least 20, at least 21, at least 22 or at least 23) contiguous nucleotides of a sequence as set forth in SEQ ID NO: 491. In some embodiments, an oligonucleotide herein has a sense strand that comprise at least about 12 (e.g., at least 13, at least 14, at least 15, at least 16, at least 17, at least 18, or at least 19) contiguous nucleotides of a sequence as set forth in any one of SEQ ID NOs: 2, 4, 5, 6, 7, 9, or 20.

[0208] In some embodiments, an oligonucleotide provided herein (e.g., an RNAi oligonucleotide) comprises a sense strand (or passenger strand) of up to about 50 nucleotides in length (e.g., up to 50, up to 40, up to 36, up to 30, up to 27, up to 25, up to 21, up to 19, up to 17 or up to 12 nucleotides in length). In some embodiments, an oligonucleotide herein comprises a sense strand of at least about 12 nucleotides in length (e.g., at least 12, at least 15, at least 19, at least 21, at least 25, at least 27, at least 30, at least 36 or at least 38 nucleotides in length). In some embodiments, an oligonucleotide herein comprises a sense strand in a range of about 12 to about 50 (e.g., 12 to 50, 12 to 40, 12 to 36, 12 to 32, 12 to 28, 15 to 40, 15 to 36, 15 to 32, 15 to 28, 17 to 21, 17 to 25, 19 to 27, 19 to 30, 20 to 40, 22 to 40, 25 to 40 or 32 to 40) nucleotides in length. In some embodiments, an oligonucleotide herein comprises a sense strand of 15 to 50 nucleotides in length. In some embodiments, an oligonucleotide herein comprises a sense strand of 18 to 36 nucleotides in length. In some embodiments, an oligonucleotide herein comprises a sense strand of 12, 13, 14, 15, 16, 17, 18, 19, 20, 21, 22, 23, 24, 25, 26, 27, 28, 29, 30, 31, 32, 33, 34, 35, 36, 37, 38, 39, 40, 41, 42, 43, 44, 45, 46, 47, 48, 49, or 50 nucleotides in length. In some embodiments, an oligonucleotide herein comprises a sense strand of 36 nucleotides in length.

[0209] In some embodiments, an oligonucleotide provided herein (e.g., an RNAi oligonucleotide) comprises a sense strand comprising a stem-loop structure at the 3′ end of the sense strand. In some embodiments, the stem-loop is formed by intrastrand base pairing. In some embodiments, a sense strand comprises a stem-loop structure at its 5′ end. In some embodiments, the stem of the stem-loop comprises a duplex of 2, 3, 4, 5, 6, 7, 8, 9, 10, 11, 12, 13 or 14 nucleotides in length. In some embodiments, the stem of the stem-loop comprises a duplex of 2 nucleotides in length. In some embodiments, the stem of the stem-loop comprises a duplex of 3 nucleotides in length. In some embodiments, the stem of the stem-loop comprises a duplex of 4 nucleotides in length. In some embodiments, the stem of the stem-loop comprises a duplex of 5 nucleotides in length. In some embodiments, the stem of the stem-loop comprises a duplex of 6 nucleotides in length. In some embodiments, the stem of the stem-loop comprises a duplex of 7 nucleotides in length. In some embodiments, the stem of the stem-loop comprises a duplex of 8 nucleotides in length. In some embodiments, the stem of the stem-loop comprises a duplex of 9 nucleotides in length. In some embodiments, the stem of the stem-loop comprises a duplex of 10 nucleotides in length. In some embodiments, the stem of the stem-loop comprises a duplex of 11 nucleotides in length. In some embodiments, the stem of the stem-loop comprises a duplex of 12 nucleotides in length. In some embodiments, the stem of the stem-loop comprises a duplex of 13 nucleotides in length. In some embodiments, the stem of the stem-loop comprises a duplex of 14 nucleotides in length.

[0210] In some embodiments, a stem-loop provides the oligonucleotide protection against degradation (e.g., enzymatic degradation), facilitates or improves targeting and/or delivery to a target cell, tissue, or organ, or both. For example, in some embodiments, the loop of a stem-loop is comprised of nucleotides comprising one or more modifications that facilitate, improve, or increase targeting to a target mRNA (e.g., a CD274 mRNA), inhibition of target gene expression (e.g., CD274 expression), and/or delivery, uptake, and/or penetrance into a target cell, tissue, or organ, or a combination thereof. In some embodiments, the stem-loop itself or modification(s) to the stem-loop do not affect or do not substantially affect the inherent gene expression inhibition activity of the oligonucleotide, but facilitates, improves, or increases stability (e.g., provides protection against degradation) and/or delivery, uptake, and/or penetrance of the oligonucleotide to a target cell, tissue, or organ. In certain embodiments, an oligonucleotide herein comprises a sense strand comprising (e.g., at its 3′ end) a stem-loop set forth as: S1-L-S2, in which S1 is complementary to S2, and in which L forms a single-stranded loop of linked nucleotides between S1 and S2 of up to about 10 nucleotides in length (e.g., 3, 4, 5, 6, 7, 8, 9 or 10 nucleotides in length). In some embodiments, the loop (L) is 3 nucleotides in length. In some embodiments, the loop (L) is 4 nucleotides in length. In some embodiments, the loop (L) is 5 nucleotides in length. In some embodiments, the loop (L) is 6 nucleotides in length. In some embodiments, the loop (L) is 7 nucleotides in length. In some embodiments, the loop (L) is 8 nucleotides in length. In some embodiments, the loop (L) is 9 nucleotides in length. In some embodiments, the loop (L) is 10 nucleotides in length.

[0211] In some embodiments, the tetraloop comprises the sequence 5′-GAAA-3′. In some embodiments, the stem loop comprises the sequence 5′-GCAGCCGAAAGGCUGC-3′ (SEQ ID NO: 856).

[0212] In some embodiments, an oligonucleotide provided herein (e.g., an RNAi oligonucleotide) comprises a targeting sequence or a region of complementary that is complementary to a contiguous sequence of nucleotides of any one of SEQ ID NOs: 1-2 and 4-241, and the oligonucleotide comprises a sense strand comprising (e.g., at its 3′ end) a stem-loop set forth as: S1-L-S2, in which S1 is complementary to S2, and in which L forms a single-stranded loop between S1 and S2 of up to about 10 nucleotides in length (e.g., 3, 4, 5, 6, 7, 8, 9 or 10 nucleotides in length). In some embodiments, the oligonucleotide comprises a targeting sequence or a region of complementary that is complementary to a contiguous sequence of nucleotides of any one of SEQ ID NOs: 1-2 and 4-241, and the oligonucleotide comprises a sense strand comprising (e.g., at its 3′ end) a stem-loop set forth as: S1-L-S2, in which S1 is complementary to S2, and in which L forms a single-stranded loop between S1 and S2 of 4 nucleotides in length.

[0213] In some embodiments, an oligonucleotide provided herein (e.g., an RNAi oligonucleotide) comprises a targeting sequence or a region of complementary that is complementary to a contiguous sequence of nucleotides of SEQ ID NO: 2, and the oligonucleotide comprises a sense strand comprising (e.g., at its 3′ end) a stem-loop set forth as: S1-L-S2, in which S1 is complementary to S2, and in which L forms a single-stranded loop between S1 and S2 of up to about 10 nucleotides in length (e.g., 3, 4, 5, 6, 7, 8, 9 or 10 nucleotides in length). In some embodiments, the oligonucleotide comprises a targeting sequence or a region of complementary that is complementary to a contiguous sequence of nucleotides of SEQ ID NO: 2, and the oligonucleotide comprises a sense strand comprising (e.g., at its 3′ end) a stem-loop set forth as: S1-L-S2, in which S1 is complementary to S2, and in which L forms a single-stranded loop between S1 and S2 of 4 nucleotides in length. In some embodiments, an oligonucleotide provided herein (e.g., an RNAi oligonucleotide) comprises a targeting sequence or a region of complementary that is complementary to a contiguous sequence of nucleotides of SEQ ID NO: 5, and the oligonucleotide comprises a sense strand comprising (e.g., at its 3′ end) a stem-loop set forth as: S1-L-S2, in which S1 is complementary to S2, and in which L forms a single-stranded loop between S1 and S2 of up to about 10 nucleotides in length (e.g., 3, 4, 5, 6, 7, 8, 9 or 10 nucleotides in length). In some embodiments, the oligonucleotide comprises a targeting sequence or a region of complementary that is complementary to a contiguous sequence of nucleotides of SEQ ID NO: 5, and the oligonucleotide comprises a sense strand comprising (e.g., at its 3′ end) a stem-loop set forth as: S1-L-S2, in which S1 is complementary to S2, and in which L forms a single-stranded loop between S1 and S2 of 4 nucleotides in length. In some embodiments, an oligonucleotide provided herein (e.g., an RNAi oligonucleotide) comprises a targeting sequence or a region of complementary that is complementary to a contiguous sequence of nucleotides of SEQ ID NO: 9, and the oligonucleotide comprises a sense strand comprising (e.g., at its 3′ end) a stem-loop set forth as: S1-L-S2, in which S1 is complementary to S2, and in which L forms a single-stranded loop between S1 and S2 of up to about 10 nucleotides in length (e.g., 3, 4, 5, 6, 7, 8, 9 or 10 nucleotides in length). In some embodiments, the oligonucleotide comprises a targeting sequence or a region of complementary that is complementary to a contiguous sequence of nucleotides of SEQ ID NO: 9, and the oligonucleotide comprises a sense strand comprising (e.g., at its 3′ end) a stem-loop set forth as: S1-L-S2, in which S1 is complementary to S2, and in which L forms a single-stranded loop between S1 and S2 of 4 nucleotides in length.

[0214] In some embodiments, a loop (L) of a stem-loop having the structure S1-L-S2 as described herein is a triloop. In some embodiments, the oligonucleotide comprises a targeting sequence or a region of complementary that is complementary to a contiguous sequence of nucleotides of any one of SEQ ID NOs: 1-2 and 4-241 and a triloop. In some embodiments, the triloop comprises ribonucleotides, deoxyribonucleotides, modified nucleotides, ligands (e.g., delivery ligands), and combinations thereof.

[0215] In some embodiments, a loop (L) of a stem-loop having the structure S1-L-S2 as described above is a tetraloop as describe in U.S. Pat. No. 10,131,912, incorporated herein by reference. In some embodiments, an oligonucleotide herein comprises a targeting sequence or a region of complementary that is complementary to a contiguous sequence of nucleotides of any one of SEQ ID NOs: 1-2 and 4-241 and a tetraloop. In some embodiments, the tetraloop comprises ribonucleotides, deoxyribonucleotides, modified nucleotides, ligands (e.g., delivery ligands), and combinations thereof.

### Duplex Length

[0216] In some embodiments, a duplex formed between a sense and antisense strand is at least 12 (e.g., at least 15, at least 16, at least 17, at least 18, at least 19, at least 20, or at least 21) nucleotides in length. In some embodiments, a duplex formed between a sense and antisense strand is in the range of 12-30 nucleotides in length (e.g., 12 to 30, 12 to 27, 12 to 22, 15 to 25, 18 to 30, 18 to 22, 18 to 25, 18 to 27, 18 to 30, 19 to 30 or 21 to 30 nucleotides in length). In some embodiments, a duplex formed between a sense and antisense strand is 12, 13, 14, 15, 16, 17, 18, 19, 29, 21, 22, 23, 24, 25, 26, 27, 28, 29 or 30 nucleotides in length. In some embodiments, a duplex formed between a sense and antisense strand is 12 nucleotides in length. In some embodiments, a duplex formed between a sense and antisense strand is 13 nucleotides in length. In some embodiments, a duplex formed between a sense and antisense strand is 14 nucleotides in length. In some embodiments, a duplex formed between a sense and antisense strand is 15 nucleotides in length. In some embodiments, a duplex formed between a sense and antisense strand is 16 nucleotides in length. In some embodiments, a duplex formed between a sense and antisense strand is 17 nucleotides in length. In some embodiments, a duplex formed between a sense and antisense strand is 18 nucleotides in length. In some embodiments, a duplex formed between a sense and antisense strand is 19 nucleotides in length. In some embodiments, a duplex formed between a sense and antisense strand is 20 nucleotides in length. In some embodiments, a duplex formed between a sense and antisense strand is 21 nucleotides in length. In some embodiments, a duplex formed between a sense and antisense strand is 22 nucleotides in length. In some embodiments, a duplex formed between a sense and antisense strand is 23 nucleotides in length. In some embodiments, a duplex formed between a sense and antisense strand is 24 nucleotides in length. In some embodiments, a duplex formed between a sense and antisense strand is 25 nucleotides in length. In some embodiments, a duplex formed between a sense and antisense strand is 26 nucleotides in length. In some embodiments, a duplex formed between a sense and antisense strand is 27 nucleotides in length. In some embodiments, a duplex formed between a sense and antisense strand is 28 nucleotides in length. In some embodiments, a duplex formed between a sense and antisense strand is 29 nucleotides in length. In some embodiments, a duplex formed between a sense and antisense strand is 30 nucleotides in length. In some embodiments, a duplex formed between a sense and antisense strand does not span the entire length of the sense strand and/or antisense strand. In some embodiments, a duplex between a sense and antisense strand spans the entire length of either the sense or antisense strands. In some embodiments, a duplex between a sense and antisense strand spans the entire length of both the sense strand and the antisense strand. In some embodiments, the sense and antisense strands of an oligonucleotide comprise nucleotides sequences selected from the group consisting of:
[0217] (a) SEQ ID NOs: 483 and 724, respectively;
[0218] (b) SEQ ID NOs: 484 and 725, respectively;
[0219] (c) SEQ ID NOs: 486 and 727, respectively;
[0220] (d) SEQ ID NOs: 487 and 728, respectively;
[0221] (e) SEQ ID NOs: 488 and 729, respectively;
[0222] (f) SEQ ID NOs: 489 and 730, respectively;
[0223] (g) SEQ ID NOs: 490 and 731, respectively;
[0224] (h) SEQ ID NOs: 492 and 733, respectively;
[0225] (i) SEQ ID NOs: 493 and 734, respectively;
[0226] (j) SEQ ID NOs: 494 and 735, respectively;
[0227] (k) SEQ ID NOs: 495 and 736, respectively;
[0228] (l) SEQ ID NOs: 496 and 737, respectively;
[0229] (m) SEQ ID NOs: 497 and 738, respectively;
[0230] (n) SEQ ID NOs: 498 and 739, respectively;
[0231] (o) SEQ ID NOs: 499 and 740, respectively;
[0232] (p) SEQ ID NOs: 500 and 741, respectively;
[0233] (q) SEQ ID NOs: 501 and 742, respectively;
[0234] (r) SEQ ID NOs: 502 and 743, respectively;
[0235] (s) SEQ ID NOs: 503 and 744, respectively;
[0236] (t) SEQ ID NOs: 504 and 745, respectively;
[0237] (u) SEQ ID NOs: 505 and 746, respectively;
[0238] (v) SEQ ID NOs: 506 and 747, respectively;
[0239] (w) SEQ ID NOs: 507 and 748, respectively;
[0240] (x) SEQ ID NOs: 508 and 749, respectively;
[0241] (y) SEQ ID NOs: 509 and 750, respectively;
[0242] (z) SEQ ID NOs: 510 and 751, respectively;
[0243] (aa) SEQ ID NOs: 511 and 752, respectively;
[0244] (bb) SEQ ID NOs: 512 and 753, respectively;
[0245] (cc) SEQ ID NOs: 513 and 754, respectively;
[0246] (dd) SEQ ID NOs: 514 and 755, respectively;
[0247] (ee) SEQ ID NOs: 515 and 756, respectively;
[0248] (ff) SEQ ID NOs: 516 and 757, respectively;
[0249] (gg) SEQ ID NOs: 517 and 758, respectively;
[0250] (hh) SEQ ID NOs: 518 and 758, respectively; and,
[0251] (ii) SEQ ID NOs: 491 and 732, respectively,
   wherein a duplex formed between a sense and antisense strand is in the range of 12-30 nucleotides in length (e.g., 12 to 30, 12 to 27, 12 to 22, 15 to 25, 18 to 30, 18 to 22, 18 to 25, 18 to 27, 18 to 30, 19 to 30 or 21 to 30 nucleotides in length)

[0252] In some embodiments, a duplex between a sense and antisense strand spans the entire length of both the sense strand and the antisense strand. In some embodiments, the sense and antisense strands of an oligonucleotide comprise nucleotides sequences selected from the group consisting of:
[0253] (a) SEQ ID NOs: 484 and 725, respectively;
[0254] (b) SEQ ID NOs: 486 and 727, respectively;
[0255] (c) SEQ ID NOs: 487 and 728, respectively;
[0256] (d) SEQ ID NOs: 488 and 729, respectively;
[0257] (e) SEQ ID NOs: 489 and 730, respectively;
[0258] (f) SEQ ID NOs: 491 and 732, respectively; and,
[0259] (g) SEQ ID NOs: 502 and 743,
   respectively wherein a duplex formed between a sense and antisense strand is in the range of 12-30 nucleotides in length (e.g., 12 to 30, 12 to 27, 12 to 22, 15 to 25, 18 to 30, 18 to 22, 18 to 25, 18 to 27, 18 to 30, 19 to 30 or 21 to 30 nucleotides in length).

[0260] In some embodiments, a duplex between a sense and antisense strand spans the entire length of both the sense strand and the antisense strand. In some embodiments, the sense and antisense strands of an oligonucleotide comprise nucleotides sequences selected from:
[0261] (a) SEQ ID NOs: 484 and 725, respectively;
[0262] (b) SEQ ID NOs: 487 and 728, respectively; and,
[0263] (c) SEQ ID NOs: 491 and 732, respectively,
   respectively wherein a duplex formed between a sense and antisense strand is in the range of 12-30 nucleotides in length (e.g., 12 to 30, 12 to 27, 12 to 22, 15 to 25, 18 to 30, 18 to 22, 18 to 25, 18 to 27, 18 to 30, 19 to 30 or 21 to 30 nucleotides in length).

### Oligonucleotide Termini

[0264] In some embodiments, an oligonucleotide disclosed herein (e.g., an RNAi oligonucleotide) comprises a sense strand and an antisense strand, wherein the termini of either or both strands comprise a blunt end. In some embodiments, an oligonucleotide herein comprises sense and antisense strands that are separate strands which form an asymmetric duplex region having an overhang at the 3′ terminus of the antisense strand. In some embodiments, an oligonucleotide herein comprises a sense strand and an antisense strand, wherein the termini of either or both strands comprise an overhang comprising one or more nucleotides. In some embodiments, the one or more nucleotides comprising the overhang are unpaired nucleotides. In some embodiments, an oligonucleotide herein comprises a sense strand and an antisense strand, wherein the 3′ termini of the sense strand and the 5′ termini of the antisense strand comprise a blunt end. In some embodiments, an oligonucleotide herein comprises a sense strand and an antisense strand, wherein the 5′ termini of the sense strand and the 3′ termini of the antisense strand comprise a blunt end.

[0265] In some embodiments, an oligonucleotide herein comprises a sense strand and an antisense strand, wherein the 3′ terminus of either or both strands comprise a 3′-overhang comprising one or more nucleotides. In some embodiments, an oligonucleotide herein comprises a sense strand and an antisense strand, wherein the sense strand comprises a 3′-overhang comprising one or more nucleotides. In some embodiments, an oligonucleotide herein comprises a sense strand and an antisense strand, wherein the antisense strand comprises a 3′-overhang comprising one or more nucleotides. In some embodiments, an oligonucleotide herein comprises a sense strand and an antisense strand, wherein both the sense strand and the antisense strand comprises a 3′-overhang comprising one or more nucleotides.

[0266] In some embodiments, the 3′-overhang is about one (1) to twenty (20) nucleotides in length (e.g., about 1, 2, 3, 4, 5, 6, 7, 8, 9, 10, 11, 12, 13, 14, 15, 16, 17, 18, 19, or about 20 nucleotides in length). In some embodiments, the 3′ overhang is about one (1) to nineteen (19), one (1) to eighteen (18), one (1) to seventeen (17), one (1) to sixteen (16), one (1) to fifteen (15), one (1) to fourteen (14), one (1) to thirteen (13), one (1) to twelve (12), one (1) to eleven (11), one (1) to ten (10), one (1) to nine (9), one (1) to eight (8), one (1) to seven (7), one (1) to six (6), one (1) to five (5), one (1) to four (4), one (1) to three (3), or about one (1) to two (2) nucleotides in length. In some embodiments, the 3′-overhang is (1) nucleotide in length. In some embodiments, the 3′-overhang is two (2) nucleotides in length. In some embodiments, the 3′-overhang is three (3) nucleotides in length. In some embodiments, the 3′-overhang is four (4) nucleotides in length. In some embodiments, the 3′-overhang is five (5) nucleotides in length. In some embodiments, the 3′-overhang is six (6) nucleotides in length. In some embodiments, the 3′-overhang is seven (7) nucleotides in length. In some embodiments, the 3′-overhang is eight (8) nucleotides in length. In some embodiments, the 3′-overhang is nine (9) nucleotides in length. In some embodiments, the 3′-overhang is ten (10) nucleotides in length. In some embodiments, the 3′-overhang is eleven (11) nucleotides in length. In some embodiments, the 3′-overhang is twelve (12) nucleotides in length. In some embodiments, the 3′-overhang is thirteen (13) nucleotides in length. In some embodiments, the 3′-overhang is fourteen (14) nucleotides in length. In some embodiments, the 3′-overhang is fifteen (15) nucleotides in length. In some embodiments, the 3′-overhang is sixteen (16) nucleotides in length. In some embodiments, the 3′-overhang is seventeen (17) nucleotides in length. In some embodiments, the 3′-overhang is eighteen (18) nucleotides in length. In some embodiments, the 3′-overhang is nineteen (19) nucleotides in length. In some embodiments, the 3′-overhang is twenty (20) nucleotides in length.

[0267] In some embodiments, an oligonucleotide disclosed herein (e.g., an RNAi oligonucleotide) comprises a sense strand and an antisense strand, wherein the antisense strand comprises a 3′-overhang, wherein the sense and antisense strands of the oligonucleotide comprise nucleotides sequences selected from the group consisting of:
[0268] (a) SEQ ID NOs: 483 and 724, respectively;
[0269] (b) SEQ ID NOs: 484 and 725, respectively;
[0270] (c) SEQ ID NOs: 486 and 727, respectively;
[0271] (d) SEQ ID NOs: 487 and 728, respectively;
[0272] (e) SEQ ID NOs: 488 and 729, respectively;
[0273] (f) SEQ ID NOs: 489 and 730, respectively;
[0274] (g) SEQ ID NOs: 490 and 731, respectively;
[0275] (h) SEQ ID NOs: 492 and 733, respectively;
[0276] (i) SEQ ID NOs: 493 and 734, respectively;
[0277] (j) SEQ ID NOs: 494 and 735, respectively;
[0278] (k) SEQ ID NOs: 495 and 736, respectively;
[0279] (l) SEQ ID NOs: 496 and 737, respectively;
[0280] (m) SEQ ID NOs: 497 and 738, respectively;
[0281] (n) SEQ ID NOs: 498 and 739, respectively;
[0282] (o) SEQ ID NOs: 499 and 740, respectively;
[0283] (p) SEQ ID NOs: 500 and 741, respectively;
[0284] (q) SEQ ID NOs: 501 and 742, respectively;
[0285] (r) SEQ ID NOs: 502 and 743, respectively;
[0286] (s) SEQ ID NOs: 503 and 744, respectively;
[0287] (t) SEQ ID NOs: 504 and 745, respectively;
[0288] (u) SEQ ID NOs: 505 and 746, respectively;
[0289] (v) SEQ ID NOs: 506 and 747, respectively;
[0290] (w) SEQ ID NOs: 507 and 748, respectively;
[0291] (x) SEQ ID NOs: 508 and 749, respectively;
[0292] (y) SEQ ID NOs: 509 and 750, respectively;
[0293] (z) SEQ ID NOs: 510 and 751, respectively;
[0294] (aa) SEQ ID NOs: 511 and 752, respectively;
[0295] (bb) SEQ ID NOs: 512 and 753, respectively;
[0296] (cc) SEQ ID NOs: 513 and 754, respectively;
[0297] (dd) SEQ ID NOs: 514 and 755, respectively;
[0298] (ee) SEQ ID NOs: 515 and 756, respectively;
[0299] (ff) SEQ ID NOs: 516 and 757, respectively;
[0300] (gg) SEQ ID NOs: 517 and 758, respectively;
[0301] (hh) SEQ ID NOs: 518 and 758, respectively; and,
[0302] (ii) SEQ ID NOs: 491 and 732, respectively,
   and wherein the antisense strand comprises a 3′-overhang about one (1) to twenty (20) nucleotides in length (e.g., about 1, 2, 3, 4, 5, 6, 7, 8, 9, 10, 11, 12, 13, 14, 15, 16, 17, 18, 19, or about 20 nucleotides in length), optionally wherein the 3′-overhang is two (2) nucleotides in length.

[0303] In some embodiments, an oligonucleotide disclosed herein (e.g., an RNAi oligonucleotide) comprises a sense strand and an antisense strand, wherein the antisense strand comprises a 3′-overhang, wherein the sense and antisense strands of the oligonucleotide comprise nucleotides sequences selected from the group consisting of:
[0304] (a) SEQ ID NOs: 484 and 725, respectively;
[0305] (b) SEQ ID NOs: 486 and 727, respectively;
[0306] (c) SEQ ID NOs: 487 and 728, respectively;
[0307] (d) SEQ ID NOs: 488 and 729, respectively;
[0308] (e) SEQ ID NOs: 489 and 730, respectively;
[0309] (f) SEQ ID NOs: 491 and 732, respectively; and,
[0310] (g) SEQ ID NOs: 502 and 743, respectively,
   and wherein the antisense strand comprises a 3′-overhang about one (1) to twenty (20) nucleotides in length (e.g., about 1, 2, 3, 4, 5, 6, 7, 8, 9, 10, 11, 12, 13, 14, 15, 16, 17, 18, 19, or about 20 nucleotides in length), optionally wherein the 3′-overhang is two (2) nucleotides in length.

[0311] In some embodiments, an oligonucleotide disclosed herein (e.g., an RNAi oligonucleotide) comprises a sense strand and an antisense strand, wherein the antisense strand comprises a 3′-overhang, wherein the sense and antisense strands of the oligonucleotide comprise nucleotides sequences of:
[0312] (a) SEQ ID NOs: 484 and 725, respectively;
[0313] (b) SEQ ID NOs: 487 and 728, respectively; and,
[0314] (c) SEQ ID NOs: 491 and 732, respectively,
   and wherein the antisense strand comprises a 3′-overhang about one (1) to twenty (20) nucleotides in length (e.g., about 1, 2, 3, 4, 5, 6, 7, 8, 9, 10, 11, 12, 13, 14, 15, 16, 17, 18, 19, or about 20 nucleotides in length), optionally wherein the 3′-overhang is two (2) nucleotides in length.

[0315] In some embodiments, an oligonucleotide herein comprises a sense strand and an antisense strand, wherein the 5′ terminus of either or both strands comprise a 5′-overhang comprising one or more nucleotides. In some embodiments, an oligonucleotide herein comprises a sense strand and an antisense strand, wherein the sense strand comprises a 5′-overhang comprising one or more nucleotides. In some embodiments, an oligonucleotide herein comprises a sense strand and an antisense strand, wherein the antisense strand comprises a 5′-overhang comprising one or more nucleotides. In some embodiments, an oligonucleotide herein comprises a sense strand and an antisense strand, wherein both the sense strand and the antisense strand comprises a 5′-overhang comprising one or more nucleotides.

[0316] In some embodiments, the 5′-overhang is about one (1) to twenty (20) nucleotides in length (e.g., about 1, 2, 3, 4, 5, 6, 7, 8, 9, 10, 11, 12, 13, 14, 15, 16, 17, 18, 19, or about 20 nucleotides in length). In some embodiments, the 5′ overhang is about one (1) to nineteen (19), one (1) to eighteen (18), one (1) to seventeen (17), one (1) to sixteen (16), one (1) to fifteen (15), one (1) to fourteen (14), one (1) to thirteen (13), one (1) to twelve (12), one (1) to eleven (11), one (1) to ten (10), one (1) to nine (9), one (1) to eight (8), one (1) to seven (7), one (1) to six (6), one (1) to five (5), one (1) to four (4), one (1) to three (3), or about one (1) to two (2) nucleotides in length. In some embodiments, the 5′-overhang is (1) nucleotide in length. In some embodiments, the 5′-overhang is two (2) nucleotides in length. In some embodiments, the 5′-overhang is three (3) nucleotides in length. In some embodiments, the 5′-overhang is four (4) nucleotides in length. In some embodiments, the 5′-overhang is five (5) nucleotides in length. In some embodiments, the 5′-overhang is six (6) nucleotides in length. In some embodiments, the 5′-overhang is seven (7) nucleotides in length. In some embodiments, the 5′-overhang is eight (8) nucleotides in length. In some embodiments, the 5′-overhang is nine (9) nucleotides in length. In some embodiments, the 5′-overhang is ten (10) nucleotides in length. In some embodiments, the 5′-overhang is eleven (11) nucleotides in length. In some embodiments, the 5′-overhang is twelve (12) nucleotides in length. In some embodiments, the 5′-overhang is thirteen (13) nucleotides in length. In some embodiments, the 5′-overhang is fourteen (14) nucleotides in length. In some embodiments, the 5′-overhang is fifteen (15) nucleotides in length. In some embodiments, the 5′-overhang is sixteen (16) nucleotides in length. In some embodiments, the 5′-overhang is seventeen (17) nucleotides in length. In some embodiments, the 5′-overhang is eighteen (18) nucleotides in length. In some embodiments, the 5′-overhang is nineteen (19) nucleotides in length. In some embodiments, the 5′-overhang is twenty (20) nucleotides in length.

[0317] In some embodiments, an oligonucleotide disclosed herein (e.g., an RNAi oligonucleotide) comprises a sense strand and an antisense strand, wherein the antisense strand comprises a 5′-overhang, wherein the sense and antisense strands of the oligonucleotide comprise nucleotides sequences selected from the group consisting of:
[0318] (a) SEQ ID NOs: 483 and 724, respectively;
[0319] (b) SEQ ID NOs: 484 and 725, respectively;
[0320] (c) SEQ ID NOs: 486 and 727, respectively;
[0321] (d) SEQ ID NOs: 487 and 728, respectively;
[0322] (e) SEQ ID NOs: 488 and 729, respectively;
[0323] (f) SEQ ID NOs: 489 and 730, respectively;
[0324] (g) SEQ ID NOs: 490 and 731, respectively;
[0325] (h) SEQ ID NOs: 492 and 733, respectively;
[0326] (i) SEQ ID NOs: 493 and 734, respectively;
[0327] (j) SEQ ID NOs: 494 and 735, respectively;
[0328] (k) SEQ ID NOs: 495 and 736, respectively;
[0329] (l) SEQ ID NOs: 496 and 737, respectively;
[0330] (m) SEQ ID NOs: 497 and 738, respectively;
[0331] (n) SEQ ID NOs: 498 and 739, respectively;
[0332] (o) SEQ ID NOs: 499 and 740, respectively;
[0333] (p) SEQ ID NOs: 500 and 741, respectively;
[0334] (q) SEQ ID NOs: 501 and 742, respectively;
[0335] (r) SEQ ID NOs: 502 and 743, respectively;
[0336] (s) SEQ ID NOs: 503 and 744, respectively;
[0337] (t) SEQ ID NOs: 504 and 745, respectively;
[0338] (u) SEQ ID NOs: 505 and 746, respectively;
[0339] (v) SEQ ID NOs: 506 and 747, respectively;
[0340] (w) SEQ ID NOs: 507 and 748, respectively;
[0341] (x) SEQ ID NOs: 508 and 749, respectively;
[0342] (y) SEQ ID NOs: 509 and 750, respectively;
[0343] (z) SEQ ID NOs: 510 and 751, respectively;
[0344] (aa) SEQ ID NOs: 511 and 752, respectively;
[0345] (bb) SEQ ID NOs: 512 and 753, respectively;
[0346] (cc) SEQ ID NOs: 513 and 754, respectively;
[0347] (dd) SEQ ID NOs: 514 and 755, respectively;
[0348] (ee) SEQ ID NOs: 515 and 756, respectively;
[0349] (ff) SEQ ID NOs: 516 and 757, respectively;
[0350] (gg) SEQ ID NOs: 517 and 758, respectively;
[0351] (hh) SEQ ID NOs: 518 and 758, respectively; and,
[0352] (ii) SEQ ID NOs: 491 and 732, respectively,
   and wherein the antisense strand comprises a 3′-overhang about one (1) to twenty (20) nucleotides in length (e.g., about 1, 2, 3, 4, 5, 6, 7, 8, 9, 10, 11, 12, 13, 14, 15, 16, 17, 18, 19, or about 20 nucleotides in length), optionally wherein the 3′-overhang is two (2) nucleotides in length.

[0353] In some embodiments, an oligonucleotide disclosed herein (e.g., an RNAi oligonucleotide) comprises a sense strand and an antisense strand, wherein the antisense strand comprises a 5′-overhang, wherein the sense and antisense strands of the oligonucleotide comprise nucleotides sequences selected from the group consisting of:
[0354] (a) SEQ ID NOs: 484 and 725, respectively;
[0355] (b) SEQ ID NOs: 486 and 727, respectively;
[0356] (c) SEQ ID NOs: 487 and 728, respectively;
[0357] (d) SEQ ID NOs: 488 and 729, respectively;
[0358] (e) SEQ ID NOs: 489 and 730, respectively;
[0359] (f) SEQ ID NOs: 491 and 732, respectively; and,
[0360] (g) SEQ ID NOs: 502 and 743, respectively,
   and wherein the antisense strand comprises a 5′-overhang about one (1) to twenty (20) nucleotides in length (e.g., about 1, 2, 3, 4, 5, 6, 7, 8, 9, 10, 11, 12, 13, 14, 15, 16, 17, 18, 19, or about 20 nucleotides in length), optionally wherein the 5′-overhang is two (2) nucleotides in length.

[0361] In some embodiments, an oligonucleotide disclosed herein (e.g., an RNAi oligonucleotide) comprises a sense strand and an antisense strand, wherein the antisense strand comprises a 5′-overhang, wherein the sense and antisense strands of the oligonucleotide comprise nucleotides sequences of:
[0362] (a) SEQ ID NOs: 484 and 725, respectively;
[0363] (b) SEQ ID NOs: 487 and 728, respectively; and,
[0364] (c) SEQ ID NOs: 491 and 732, respectively,
   and wherein the antisense strand comprises a 5′-overhang about one (1) to twenty (20) nucleotides in length (e.g., about 1, 2, 3, 4, 5, 6, 7, 8, 9, 10, 11, 12, 13, 14, 15, 16, 17, 18, 19, or about 20 nucleotides in length), optionally wherein the 5′-overhang is two (2) nucleotides in length.

[0365] In some embodiments, one or more (e.g., 2, 3, 4, 5, or more) nucleotides comprising the 3′ terminus or 5′ terminus of a sense and/or antisense strand are modified. For example, in some embodiments, one or two terminal nucleotides of the 3′ terminus of the antisense strand are modified. In some embodiments, the last nucleotide at the 3′ terminus of an antisense strand is modified, such that it comprises 2′ modification, or it comprises, a 2′-O-methoxyethyl. In some embodiments, the last one or two terminal nucleotides at the 3′ terminus of an antisense strand are complementary with the target. In some embodiments, the last one or two nucleotides at the 3′ terminus of the antisense strand are not complementary with the target.

[0366] In some embodiments, an oligonucleotide disclosed herein (e.g., an RNAi oligonucleotide) comprises a sense strand and an antisense strand, wherein the 3′ terminus of the sense strand comprises a step-loop described herein and the 3′ terminus of the antisense strand comprises a 3′-overhang described herein. In some embodiments, an oligonucleotide herein (e.g., an RNAi oligonucleotide) comprises a sense strand and an antisense strand that form a nicked tetraloop structure described herein, wherein the 3′ terminus of the sense strand comprises a stem-loop, wherein the loop is a tetraloop described herein, and wherein the 3′ terminus of the antisense strand comprises a 3′-overhang described herein. In some embodiments, the 3′-overhang is two (2) nucleotides in length. In some embodiments, the two (2) nucleotides comprising the 3′-overhang both comprise guanine (G) nucleobases. Typically, one or both of the nucleotides comprising the 3′-overhang of the antisense strand are not complementary with the target mRNA.

### Oligonucleotide Modifications

[0367] In some embodiments, an oligonucleotide described herein (e.g., an RNAi oligonucleotide) comprises a modification. Oligonucleotides (e.g., RNAi oligonucleotides) may be modified in various ways to improve or control specificity, stability, delivery, bioavailability, resistance from nuclease degradation, immunogenicity, base-pairing properties, RNA distribution and cellular uptake and other features relevant to therapeutic or research use.

[0368] In some embodiments, the modification is a modified sugar. In some embodiments, the modification is a 5′-terminal phosphate group. In some embodiments, the modification is a modified internucleotide linkage. In some embodiments, the modification is a modified base. In some embodiments, an oligonucleotide described herein can comprise any one of the modifications described herein or any combination thereof. For example, in some embodiments, an oligonucleotide described herein comprises at least one modified sugar, a 5′-terminal phosphate group, at least one modified internucleotide linkage, and at least one modified base. In some embodiments, the sense and antisense strands of an oligonucleotide comprise nucleotides sequences selected from the group consisting of:
[0369] (a) SEQ ID NOs: 483 and 724, respectively;
[0370] (b) SEQ ID NOs: 484 and 725, respectively;
[0371] (c) SEQ ID NOs: 486 and 727, respectively;
[0372] (d) SEQ ID NOs: 487 and 728, respectively;
[0373] (e) SEQ ID NOs: 488 and 729, respectively;
[0374] (f) SEQ ID NOs: 489 and 730, respectively;
[0375] (g) SEQ ID NOs: 490 and 731, respectively;
[0376] (h) SEQ ID NOs: 492 and 733, respectively;
[0377] (i) SEQ ID NOs: 493 and 734, respectively;
[0378] (j) SEQ ID NOs: 494 and 735, respectively;
[0379] (k) SEQ ID NOs: 495 and 736, respectively;
[0380] (l) SEQ ID NOs: 496 and 737, respectively;
[0381] (m) SEQ ID NOs: 497 and 738, respectively;
[0382] (n) SEQ ID NOs: 498 and 739, respectively;
[0383] (o) SEQ ID NOs: 499 and 740, respectively;
[0384] (p) SEQ ID NOs: 500 and 741, respectively;
[0385] (q) SEQ ID NOs: 501 and 742, respectively;
[0386] (r) SEQ ID NOs: 502 and 743, respectively;
[0387] (s) SEQ ID NOs: 503 and 744, respectively;
[0388] (t) SEQ ID NOs: 504 and 745, respectively;
[0389] (u) SEQ ID NOs: 505 and 746, respectively;
[0390] (v) SEQ ID NOs: 506 and 747, respectively;
[0391] (w) SEQ ID NOs: 507 and 748, respectively;
[0392] (x) SEQ ID NOs: 508 and 749, respectively;
[0393] (y) SEQ ID NOs: 509 and 750, respectively;
[0394] (z) SEQ ID NOs: 510 and 751, respectively;
[0395] (aa) SEQ ID NOs: 511 and 752, respectively;
[0396] (bb) SEQ ID NOs: 512 and 753, respectively;
[0397] (cc) SEQ ID NOs: 513 and 754, respectively;
[0398] (dd) SEQ ID NOs: 514 and 755, respectively;
[0399] (ee) SEQ ID NOs: 515 and 756, respectively;
[0400] (ff) SEQ ID NOs: 516 and 757, respectively;
[0401] (gg) SEQ ID NOs: 517 and 758, respectively;
[0402] (hh) SEQ ID NOs: 518 and 758, respectively; and,
[0403] (ii) SEQ ID NOs: 491 and 732, respectively,
   wherein the oligonucleotide comprises at least one modified sugar, a 5′-terminal phosphate group, at least one modified internucleotide linkage, and at least one modified base.

[0404] In some embodiments, an oligonucleotide described herein comprises at least one modified sugar, a 5′-terminal phosphate group, at least one modified internucleotide linkage, and at least one modified base. In some embodiments, the sense and antisense strands of an oligonucleotide comprise nucleotides sequences selected from the group consisting of:
[0405] (a) SEQ ID NOs: 484 and 725, respectively;
[0406] (b) SEQ ID NOs: 486 and 727, respectively;
[0407] (c) SEQ ID NOs: 487 and 728, respectively;
[0408] (d) SEQ ID NOs: 488 and 729, respectively;
[0409] (e) SEQ ID NOs: 489 and 730, respectively;
[0410] (f) SEQ ID NOs: 491 and 732, respectively; and,
[0411] (g) SEQ ID NOs: 502 and 743, respectively,
   wherein the oligonucleotide comprises at least one modified sugar, a 5′-terminal phosphate group, at least one modified internucleotide linkage, and at least one modified base.
   In some embodiments, an oligonucleotide described herein comprises at least one modified sugar, a 5′-terminal phosphate group, at least one modified internucleotide linkage, and at least one modified base. In some embodiments, the sense and antisense strands of an oligonucleotide comprise nucleotides sequences selected from the group consisting of:
[0412] (a) SEQ ID NOs: 484 and 725, respectively;
[0413] (b) SEQ ID NOs: 487 and 728, respectively; and,
[0414] (c) SEQ ID NOs: 491 and 732, respectively,
   wherein the oligonucleotide comprises at least one modified sugar, a 5′-terminal phosphate group, at least one modified internucleotide linkage, and at least one modified base.

[0415] The number of modifications on an oligonucleotide (e.g., an RNAi oligonucleotide) and the position of those nucleotide modifications may influence the properties of an oligonucleotide. For example, oligonucleotides may be delivered in vivo by conjugating them to or encompassing them in a lipid nanoparticle (LNP) or similar carrier. However, when an oligonucleotide is not protected by an LNP or similar carrier, it may be advantageous for at least some of the nucleotides to be modified. Accordingly, in some embodiments, all or substantially all the nucleotides of an oligonucleotide are modified. In some embodiments, more than half of the nucleotides are modified. In some embodiments, less than half of the nucleotides are modified. In some embodiments, the sugar moiety of all nucleotides comprising the oligonucleotide is modified at the 2′ position. The modifications may be reversible or irreversible. In some embodiments, an oligonucleotide as disclosed herein has a number and type of modified nucleotides sufficient to cause the desired characteristics (e.g., protection from enzymatic degradation, capacity to target a desired cell after in vivo administration, and/or thermodynamic stability).

### Sugar Modifications

[0416] In some embodiments, an oligonucleotide described herein (e.g., an RNAi oligonucleotide) comprises a modified sugar. In some embodiments, a modified sugar (also referred herein to a sugar analog) includes a modified deoxyribose or ribose moiety in which, for example, one or more modifications occur at the 2′, 3′, 4′ and/or 5′ carbon position of the sugar. In some embodiments, a modified sugar may also include non-natural alternative carbon structures such as those present in locked nucleic acids (“LNA”; see, e.g., Koshkin et al. (1998) TETRAHEDRON 54:3607-30), unlocked nucleic acids (“UNA”; see, e.g., Snead et al. (2013) MOL. THER-NUCL. ACIDS 2:e103) and bridged nucleic acids (“BNA”; see, e.g., Imanishi & Obika (2002) CHEM COMMUN. (CAMB) 21:1653-59).

[0417] In some embodiments, a nucleotide modification in a sugar comprises a 2′-modification. In some embodiments, a 2′-modification may be 2′-O-propargyl, 2′-O-propylamin, 2′-amino, 2′-ethyl, 2′-fluoro (2′-F), 2′-aminoethyl (EA), 2′-O-methyl (2′-OMe), 2′-O-methoxyethyl (2′-MOE), 2′-O-[2-(methylamino)-2-oxoethyl](2′-O-NMA) or 2′-deoxy-2′-fluoro-β-d-arabinonucleic acid (2′-FANA). In some embodiments, the modification is 2′-F, 2′-OMe or 2′-MOE. In some embodiments, a modification in a sugar comprises a modification of the sugar ring, which may comprise modification of one or more carbons of the sugar ring. For example, a modification of a sugar of a nucleotide may comprise a 2′-oxygen of a sugar is linked to a 1′-carbon or 4′-carbon of the sugar, or a 2′-oxygen is linked to the 1′-carbon or 4′-carbon via an ethylene or methylene bridge. In some embodiments, a modified nucleotide has an acyclic sugar that lacks a 2′-carbon to 3′-carbon bond. In some embodiments, a modified nucleotide has a thiol group, e.g., in the 4′ position of the sugar.

[0418] In some embodiments, an oligonucleotide (e.g., an RNAi oligonucleotide) described herein comprises at least about 1 modified nucleotide (e.g., at least 1, at least 5, at least 10, at least 15, at least 20, at least 25, at least 30, at least 35, at least 40, at least 45, at least 50, at least 55, at least 60, or more). In some embodiments, the sense strand of the oligonucleotide comprises at least about 1 modified nucleotide (e.g., at least 1, at least 5, at least 10, at least 15, at least 20, at least 25, at least 30, at least 35, or more). In some embodiments, the antisense strand of the oligonucleotide comprises at least about 1 modified nucleotide (e.g., at least 1, at least 5, at least 10, at least 15, at least 20, or more).

[0419] In some embodiments, all the nucleotides of the sense strand of the oligonucleotide are modified. In some embodiments, all the nucleotides of the antisense strand of the oligonucleotide are modified. In some embodiments, all the nucleotides of the oligonucleotide (i.e., both the sense strand and the antisense strand) are modified. In some embodiments, the modified nucleotide comprises a 2′-modification (e.g., a 2′-F or 2′-OMe, 2′-MOE, and 2′-deoxy-2′-fluoro-β-d-arabinonucleic acid).

[0420] In some embodiments, the disclosure provides oligonucleotides having different modification patterns. In some embodiments, an oligonucleotide herein comprises a sense strand having a modification pattern as set forth in the Examples and Sequence Listing and an antisense strand having a modification pattern as set forth in the Examples and Sequence Listing.

[0421] In some embodiments, an oligonucleotide disclosed herein (e.g., an RNAi oligonucleotide) comprises an antisense strand having nucleotides that are modified with 2′-F. In some embodiments, an oligonucleotide herein comprises an antisense strand comprising nucleotides that are modified with 2′-F and 2′-OMe. In some embodiments, an oligonucleotide disclosed herein comprises a sense strand having nucleotides that are modified with 2′-F. In some embodiments, an oligonucleotide disclosed herein comprises a sense strand comprises nucleotides that are modified with 2′-F and 2′-OMe.

[0422] In some embodiments, an oligonucleotide described herein comprises a sense strand with about 10-15%, 10%, 11%, 12%, 13%, 14% or 15% of the nucleotides of the sense strand comprising a 2′-fluoro modification. In some embodiments, about 11% of the nucleotides of the sense strand comprise a 2-fluoro modification. In some embodiments, an oligonucleotide described herein comprises an antisense strand with about 25-35%, 25%, 26%, 27%, 28%, 29%, 30%, 31%, 32%, 33%, 34% or 35% of the nucleotides of the antisense strand comprising a 2′-fluoro modification. In some embodiments, about 32% of the nucleotides of the antisense strand comprise a 2′-fluoro modification. In some embodiments, the oligonucleotide has about 15-25%, 15%, 16%, 17%, 18%, 19%, 20%, 21%, 22%, 23%, 24%, or 25% of its nucleotides comprising a 2′-fluoro modification. In some embodiments, about 19% of the nucleotides in the oligonucleotide comprise a 2′-fluoro modification.

[0423] In some embodiments, one or more of positions 8, 9, 10 or 11 of the sense strand is modified with a 2′-F group. In some embodiments, one or more of positions 3, 8, 9, 10, 12, 13 and 17 of the sense strand is modified with a 2′-F group. In some embodiments, one or more of positions 2, 3, 4, 5, 7, 10 and 14 of the antisense strand is modified with a 2′-F group. In some embodiments, one or more of positions 2, 3, 4, 5, 7, 8, 10, 14, 16 and 19 is modified with a 2′-F group. In some embodiments, the sugar moiety at each of nucleotides at positions 1-7 and 12-20 in the sense strand is modified with a 2′-OMe. In some embodiments, the sugar moiety at each of nucleotides at positions 1-7, 12-27 and 31-36 in the sense strand is modified with a 2′-OMe. In some embodiments, the sugar moiety at each of nucleotides at positions 6, 9, 11-13, 15, 17, 18 and 20-22 in the sense strand is modified with a 2′-OMe.

[0424] In some embodiments, the sense and antisense strands of an oligonucleotide comprise nucleotides sequences selected from the group consisting of:
[0425] (a) SEQ ID NOs: 483 and 724, respectively;
[0426] (b) SEQ ID NOs: 484 and 725, respectively;
[0427] (c) SEQ ID NOs: 486 and 727, respectively;
[0428] (d) SEQ ID NOs: 487 and 728, respectively;
[0429] (e) SEQ ID NOs: 488 and 729, respectively;
[0430] (f) SEQ ID NOs: 489 and 730, respectively;
[0431] (g) SEQ ID NOs: 490 and 731, respectively;
[0432] (h) SEQ ID NOs: 492 and 733, respectively;
[0433] (i) SEQ ID NOs: 493 and 734, respectively;
[0434] (j) SEQ ID NOs: 494 and 735, respectively;
[0435] (k) SEQ ID NOs: 495 and 736, respectively;
[0436] (l) SEQ ID NOs: 496 and 737, respectively;
[0437] (m) SEQ ID NOs: 497 and 738, respectively;
[0438] (n) SEQ ID NOs: 498 and 739, respectively;
[0439] (o) SEQ ID NOs: 499 and 740, respectively;
[0440] (p) SEQ ID NOs: 500 and 741, respectively;
[0441] (q) SEQ ID NOs: 501 and 742, respectively;
[0442] (r) SEQ ID NOs: 502 and 743, respectively;
[0443] (s) SEQ ID NOs: 503 and 744, respectively;
[0444] (t) SEQ ID NOs: 504 and 745, respectively;
[0445] (u) SEQ ID NOs: 505 and 746, respectively;
[0446] (v) SEQ ID NOs: 506 and 747, respectively;
[0447] (w) SEQ ID NOs: 507 and 748, respectively;
[0448] (x) SEQ ID NOs: 508 and 749, respectively;
[0449] (y) SEQ ID NOs: 509 and 750, respectively;
[0450] (z) SEQ ID NOs: 510 and 751, respectively;
[0451] (aa) SEQ ID NOs: 511 and 752, respectively;
[0452] (bb) SEQ ID NOs: 512 and 753, respectively;
[0453] (cc) SEQ ID NOs: 513 and 754, respectively;
[0454] (dd) SEQ ID NOs: 514 and 755, respectively;
[0455] (ee) SEQ ID NOs: 515 and 756, respectively;
[0456] (ff) SEQ ID NOs: 516 and 757, respectively;
[0457] (gg) SEQ ID NOs: 517 and 758, respectively;
[0458] (hh) SEQ ID NOs: 518 and 758, respectively; and,
[0459] (ii) SEQ ID NOs: 491 and 732, respectively,
   wherein one or more of positions 8, 9, 10 or 11 of the sense strand is modified with a 2′-F group.

[0460] In some embodiments, the sense and antisense strands of an oligonucleotide comprise nucleotides sequences selected from the group consisting of:
[0461] (a) SEQ ID NOs: 484 and 725, respectively;
[0462] (b) SEQ ID NOs: 486 and 727, respectively;
[0463] (c) SEQ ID NOs: 487 and 728, respectively;
[0464] (d) SEQ ID NOs: 488 and 729, respectively;
[0465] (e) SEQ ID NOs: 489 and 730, respectively;
[0466] (f) SEQ ID NOs: 491 and 732, respectively; and,
[0467] (g) SEQ ID NOs: 502 and 743, respectively,
   wherein one or more of positions 8, 9, 10 or 11 of the sense strand is modified with a 2′-F group.

[0468] In some embodiments, the sense and antisense strands of an oligonucleotide comprise nucleotides sequences selected from the group consisting of:
[0469] (a) SEQ ID NOs: 484 and 725, respectively;
[0470] (b) SEQ ID NOs: 487 and 728, respectively; and,
[0471] (c) SEQ ID NOs: 491 and 732, respectively,
   wherein one or more of positions 8, 9, 10 or 11 of the sense strand is modified with a 2′-F group.

[0472] In some embodiments, an oligonucleotide provided herein comprises an antisense strand having the sugar moiety of each of the nucleotides at positions 2, 5, and 14 of the antisense strand modified with 2′-F and the sugar moiety of each of the remaining nucleotides of the antisense strand modified with a modification selected from the group consisting of 2′-O-propargyl, 2′-O-propylamin, 2′-amino, 2′-ethyl, 2′-aminoethyl (EA), 2′-O-methyl (2′-OMe), 2′-O-methoxyethyl (2′-MOE), 2′-O-[2-(methylamino)-2-oxoethyl](2′-O-NMA), and 2′-deoxy-2′-fluoro-β-d-arabinonucleic acid (2′-FANA).

[0473] In some embodiments, an oligonucleotide provided herein comprises an antisense strand having the sugar moiety of each of the nucleotides at positions 1, 2, 5, and 14 of the antisense strand modified with 2′-F and the sugar moiety of each of the remaining nucleotides of the antisense strand modified with a modification selected from the group consisting of 2′-O-propargyl, 2′-O-propylamin, 2′-amino, 2′-ethyl, 2′-aminoethyl (EA), 2′-O-methyl (2′-OMe), 2′-O-methoxyethyl (2′-MOE), 2′-O-[2-(methylamino)-2-oxoethyl](2′-O-NMA), and 2′-deoxy-2′-fluoro-β-d-arabinonucleic acid (2′-FANA).

[0474] In some embodiments, an oligonucleotide provided herein comprises an antisense strand having the sugar moiety of each of the nucleotides at positions 2, 4, 5, and 14 of the antisense strand modified with 2′-F and the sugar moiety of each of the remaining nucleotides of the antisense strand modified with a modification selected from the group consisting of 2′-O-propargyl, 2′-O-propylamin, 2′-amino, 2′-ethyl, 2′-aminoethyl (EA), 2′-O-methyl (2′-OMe), 2′-O-methoxyethyl (2′-MOE), 2′-O-[2-(methylamino)-2-oxoethyl](2′-O-NMA), and 2′-deoxy-2′-fluoro-β-d-arabinonucleic acid (2′-FANA).

[0475] In some embodiments, an oligonucleotide provided herein comprises an antisense strand having the sugar moiety of each of the nucleotides at positions 1, 2, 3, 5, 7, and 14 of the antisense strand modified with 2′-F and the sugar moiety of each of the remaining nucleotides of the antisense strand modified with a modification selected from the group consisting of 2′-O-propargyl, 2′-O-propylamin, 2′-amino, 2′-ethyl, 2′-aminoethyl (EA), 2′-O-methyl (2′-OMe), 2′-O-methoxyethyl (2′-MOE), 2′-O-[2-(methylamino)-2-oxoethyl](2′-O-NMA), and 2′-deoxy-2′-fluoro-β-d-arabinonucleic acid (2′-FANA).

[0476] In some embodiments, an oligonucleotide provided herein comprises an antisense strand having the sugar moiety of each of the nucleotides at positions 2, 3, 4, 5, 7, and 14 of the antisense strand modified with 2′-F and the sugar moiety of each of the remaining nucleotides of the antisense strand modified with a modification selected from the group consisting of 2′-O-propargyl, 2′-O-propylamin, 2′-amino, 2′-ethyl, 2′-aminoethyl (EA), 2′-O-methyl (2′-OMe), 2′-O-methoxyethyl (2′-MOE), 2′-O-[2-(methylamino)-2-oxoethyl](2′-O-NMA), and 2′-deoxy-2′-fluoro-β-d-arabinonucleic acid (2′-FANA).

[0477] In some embodiments, an oligonucleotide provided herein comprises an antisense strand having the sugar moiety of each of the nucleotides at positions 1, 2, 3, 5, 10, and 14 of the antisense strand modified with 2′-F and the sugar moiety of each of the remaining nucleotides of the antisense strand modified with a modification selected from the group consisting of 2′-O-propargyl, 2′-O-propylamin, 2′-amino, 2′-ethyl, 2′-aminoethyl (EA), 2′-O-methyl (2′-OMe), 2′-O-methoxyethyl (2′-MOE), 2′-O-[2-(methylamino)-2-oxoethyl](2′-O-NMA), and 2′-deoxy-2′-fluoro-β-d-arabinonucleic acid (2′-FANA).

[0478] In some embodiments, an oligonucleotide provided herein comprises an antisense strand having the sugar moiety of each of the nucleotides at positions 2, 3, 4, 5, 10, and 14 of the antisense strand modified with 2′-F and the sugar moiety of each of the remaining nucleotides of the antisense strand modified with a modification selected from the group consisting of 2′-O-propargyl, 2′-O-propylamin, 2′-amino, 2′-ethyl, 2′-aminoethyl (EA), 2′-O-methyl (2′-OMe), 2′-O-methoxyethyl (2′-MOE), 2′-O-[2-(methylamino)-2-oxoethyl](2′-O-NMA), and 2′-deoxy-2′-fluoro-β-d-arabinonucleic acid (2′-FANA).

[0479] In some embodiments, an oligonucleotide provided herein comprises an antisense strand having the sugar moiety of each of the nucleotides at positions 2, 3, 5, 7, 10, and 14 of the antisense strand modified with 2′-F and the sugar moiety of each of the remaining nucleotides of the antisense strand modified with a modification selected from the group consisting of 2′-O-propargyl, 2′-O-propylamin, 2′-amino, 2′-ethyl, 2′-aminoethyl (EA), 2′-O-methyl (2′-OMe), 2′-O-methoxyethyl (2′-MOE), 2′-O-[2-(methylamino)-2-oxoethyl](2′-O-NMA), and 2′-deoxy-2′-fluoro-β-d-arabinonucleic acid (2′-FANA).

[0480] In some embodiments, an oligonucleotide provided herein comprises an antisense strand having the sugar moiety of each of the nucleotides at positions 2, 3, 4, 5, 7, 10, and 14 of the antisense strand modified with 2′-F and the sugar moiety of each of the remaining nucleotides of the antisense strand modified with a modification selected from the group consisting of 2′-O-propargyl, 2′-O-propylamin, 2′-amino, 2′-ethyl, 2′-aminoethyl (EA), 2′-O-methyl (2′-OMe), 2′-O-methoxyethyl (2′-MOE), 2′-O-[2-(methylamino)-2-oxoethyl](2′-O-NMA), and 2′-deoxy-2′-fluoro-β-d-arabinonucleic acid (2′-FANA).

[0481] In some embodiments, an oligonucleotide provided herein comprises an antisense strand having the sugar moiety of each of the nucleotides at positions 2, 3, 4, 5, 7, 8, 10, 14, 16 and 19 of the antisense strand modified with 2′-F and the sugar moiety of each of the remaining nucleotides of the antisense strand modified with a modification selected from the group consisting of 2′-O-propargyl, 2′-O-propylamin, 2′-amino, 2′-ethyl, 2′-aminoethyl (EA), 2′-O-methyl (2′-OMe), 2′-O-methoxyethyl (2′-MOE), 2′-O-[2-(methylamino)-2-oxoethyl](2′-O-NMA), and 2′-deoxy-2′-fluoro-β-d-arabinonucleic acid (2′-FANA).

[0482] In some embodiments, an oligonucleotide provided herein comprises an antisense strand having the sugar moiety at position 1, position 2, position 3, position 4, position 5, position 6, position 7, position 8, position 9, position 10, position 11, position 12, position 13, position 14, position 15, position 16, position 17, position 18, position 19, position 20, position 21, or position 22 modified with 2′-F.

[0483] In some embodiments, an oligonucleotide provided herein comprises an antisense strand having the sugar moiety at position 1, position 2, position 3, position 4, position 5, position 6, position 7, position 8, position 9, position 10, position 11, position 12, position 13, position 14, position 15, position 16, position 17, position 18, position 19, position 20, position 21, or position 22 modified with 2′-OMe.

[0484] In some embodiments, an oligonucleotide provided herein comprises an antisense strand having the sugar moiety at position 1, position 2, position 3, position 4, position 5, position 6, position 7, position 8, position 9, position 10, position 11, position 12, position 13, position 14, position 15, position 16, position 17, position 18, position 19, position 20, position 21, or position 22 modified with a modification selected from the group consisting of 2′-O-propargyl, 2′-O-propylamin, 2′-amino, 2′-ethyl, 2′-aminoethyl (EA), 2′-O-methyl (2′-OMe), 2′-O-methoxyethyl (2′-MOE), 2′-O-[2-(methylamino)-2-oxoethyl](2′-O-NMA), and 2′-deoxy-2′-fluoro-β-d-arabinonucleic acid (2′-FANA).

[0485] In some embodiments, an oligonucleotide provided herein comprises a sense strand having the sugar moiety at positions 8-11 modified with 2′-F. In some embodiments, an oligonucleotide provided herein comprises a sense strand having the sugar moiety at positions 3, 8, 9, 10, 12, 13 and 17 modified with 2′-F. In some embodiments, an oligonucleotide provided herein comprises a sense strand having the sugar moiety at positions 1-7 and 12-17 or 12-20 modified with 2′OMe. In some embodiments, an oligonucleotide provided herein comprises a sense strand having the sugar moiety at positions 1-7, 12-27 and 31-36 modified with 2′OMe. In some embodiments, an oligonucleotide provided herein comprises a sense strand having the sugar moiety of each of the nucleotides at positions 1-7 and 12-17 or 12-20 of the sense strand modified with a modification selected from the group consisting of 2′-O-propargyl, 2′-O-propylamin, 2′-amino, 2′-ethyl, 2′-aminoethyl (EA), 2′-O-methyl (2′-OMe), 2′-O-methoxyethyl (2′-MOE), 2′-O-[2-(methylamino)-2-oxoethyl](2′-O-NMA), and 2′-deoxy-2′-fluoro-β-d-arabinonucleic acid (2′-FANA). In some embodiments, an oligonucleotide provided herein comprises a sense strand having the sugar moiety at positions 1-2, 4-7, 11, 14-16 and 18-20 modified with 2′OMe. In some embodiments, an oligonucleotide provided herein comprises a sense strand having the sugar moiety of each of the nucleotides at positions 1-2, 4-7, 11, 14-16 and 18-20 of the sense strand modified with a modification selected from the group consisting of 2′-O-propargyl, 2′-O-propylamin, 2′-amino, 2′-ethyl, 2′-aminoethyl (EA), 2′-O-methyl (2′-OMe), 2′-O-methoxyethyl (2′-MOE), 2′-O-[2-(methylamino)-2-oxoethyl](2′-O-NMA), and 2′-deoxy-2′-fluoro-β-d-arabinonucleic acid (2′-FANA).

[0486] In some embodiments, an oligonucleotide provided herein comprises a sense strand having the sugar moiety at position 1, position 2, position 3, position 4, position 5, position 6, position 7, position 8, position 9, position 10, position 11, position 12, position 13, position 14, position 15, position 16, position 17, position 18, position 19, position 20, position 21, position 22, position 23, position 24, position 25, position 26, position 27, position 28, position 29, position 30, position 31, position 32, position 33, position 34, position 35, or position 36 modified with 2′-F.

[0487] In some embodiments, an oligonucleotide provided herein comprises a sense strand having the sugar moiety at position 1, position 2, position 3, position 4, position 5, position 6, position 7, position 8, position 9, position 10, position 11, position 12, position 13, position 14, position 15, position 16, position 17, position 18, position 19, position 20, position 21, position 22, position 23, position 24, position 25, position 26, position 27, position 28, position 29, position 30, position 31, position 32, position 33, position 34, position 35, or position 36 modified with 2′-OMe.

[0488] In some embodiments, an oligonucleotide provided herein comprises a sense strand having the sugar moiety at position 1, position 2, position 3, position 4, position 5, position 6, position 7, position 8, position 9, position 10, position 11, position 12, position 13, position 14, position 15, position 16, position 17, position 18, position 19, position 20, position 21, position 22, position 23, position 24, position 25, position 26, position 27, position 28, position 29, position 30, position 31, position 32, position 33, position 34, position 35, or position 36 modified with a modification selected from the group consisting of 2′-O-propargyl, 2′-O-propylamin, 2′-amino, 2′-ethyl, 2′-aminoethyl (EA), 2′-O-methyl (2′-OMe), 2′-O-methoxyethyl (2′-MOE), 2′-O-[2-(methylamino)-2-oxoethyl](2′-O-NMA), and 2′-deoxy-2′-fluoro-β-d-arabinonucleic acid (2′-FANA).

### 5′-Terminal Phosphate

[0489] In some embodiments, an oligonucleotide described herein (e.g., an RNAi oligonucleotide) comprises a sense strand and an antisense strand, wherein the antisense strand comprises a 5′-terminal phosphate. In some embodiments, 5′-terminal phosphate groups of an RNAi oligonucleotide enhance the interaction with Ago2. However, oligonucleotides comprising a 5′-phosphate group may be susceptible to degradation via phosphatases or other enzymes, which can limit their performance and/or bioavailability in vivo. In some embodiments, an oligonucleotide herein includes analogs of 5′ phosphates that are resistant to such degradation. In some embodiments, the phosphate analog is oxymethyl phosphonate, vinylphosphonate or malonylphosphonate, or a combination thereof. In certain embodiments, the 5′ terminus of an oligonucleotide strand is attached to chemical moiety that mimics the electrostatic and steric properties of a natural 5′-phosphate group (“phosphate mimic”). In some embodiments, the sense and antisense strands of an oligonucleotide comprise nucleotide sequences selected from the group consisting of:
[0490] (a) SEQ ID NOs: 483 and 724, respectively;
[0491] (b) SEQ ID NOs: 484 and 725, respectively;
[0492] (c) SEQ ID NOs: 486 and 727, respectively;
[0493] (d) SEQ ID NOs: 487 and 728, respectively;
[0494] (e) SEQ ID NOs: 488 and 729, respectively;
[0495] (f) SEQ ID NOs: 489 and 730, respectively;
[0496] (g) SEQ ID NOs: 490 and 731, respectively;
[0497] (h) SEQ ID NOs: 492 and 733, respectively;
[0498] (i) SEQ ID NOs: 493 and 734, respectively;
[0499] (j) SEQ ID NOs: 494 and 735, respectively;
[0500] (k) SEQ ID NOs: 495 and 736, respectively;
[0501] (l) SEQ ID NOs: 496 and 737, respectively;
[0502] (m) SEQ ID NOs: 497 and 738, respectively;
[0503] (n) SEQ ID NOs: 498 and 739, respectively;
[0504] (o) SEQ ID NOs: 499 and 740, respectively;
[0505] (p) SEQ ID NOs: 500 and 741, respectively;
[0506] (q) SEQ ID NOs: 501 and 742, respectively;
[0507] (r) SEQ ID NOs: 502 and 743, respectively;
[0508] (s) SEQ ID NOs: 503 and 744, respectively;
[0509] (t) SEQ ID NOs: 504 and 745, respectively;
[0510] (u) SEQ ID NOs: 505 and 746, respectively;
[0511] (v) SEQ ID NOs: 506 and 747, respectively;
[0512] (w) SEQ ID NOs: 507 and 748, respectively;
[0513] (x) SEQ ID NOs: 508 and 749, respectively;
[0514] (y) SEQ ID NOs: 509 and 750, respectively;
[0515] (z) SEQ ID NOs: 510 and 751, respectively;
[0516] (aa) SEQ ID NOs: 511 and 752, respectively;
[0517] (bb) SEQ ID NOs: 512 and 753, respectively;
[0518] (cc) SEQ ID NOs: 513 and 754, respectively;
[0519] (dd) SEQ ID NOs: 514 and 755, respectively;
[0520] (ee) SEQ ID NOs: 515 and 756, respectively;
[0521] (ff) SEQ ID NOs: 516 and 757, respectively;
[0522] (gg) SEQ ID NOs: 517 and 758, respectively;
[0523] (hh) SEQ ID NOs: 518 and 758, respectively; and,
[0524] (ii) SEQ ID NOs: 491 and 732, respectively,
   wherein the antisense strand comprises a 5′-terminal phosphate, optionally a 5′-terminal phosphate analog.

[0525] In some embodiments, the sense and antisense strands of an oligonucleotide comprise nucleotide sequences selected from the group consisting of:
[0526] (a) SEQ ID NOs: 484 and 725, respectively;
[0527] (b) SEQ ID NOs: 486 and 727, respectively;
[0528] (c) SEQ ID NOs: 487 and 728, respectively;
[0529] (d) SEQ ID NOs: 488 and 729, respectively;
[0530] (e) SEQ ID NOs: 489 and 730, respectively;
[0531] (f) SEQ ID NOs: 491 and 732, respectively; and,
[0532] (g) SEQ ID NOs: 502 and 743, respectively,
   wherein the antisense strand comprises a 5′-terminal phosphate, optionally a 5′-terminal phosphate analog.

[0533] In some embodiments, the sense and antisense strands of an oligonucleotide comprise nucleotide sequences from the group consisting of: (a) SEQ ID NOs: 484 and 725, respectively;
[0534] (a) SEQ ID NOs: 484 and 725, respectively;
[0535] (b) SEQ ID NOs: 487 and 728, respectively; and,
[0536] (c) SEQ ID NOs: 491 and 732, respectively,
   wherein the antisense strand comprises a 5′-terminal phosphate, optionally a 5′-terminal phosphate analog.

[0537] In some embodiments, an oligonucleotide herein (e.g., an RNAi oligonucleotide) has a phosphate analog at a 4′-carbon position of the sugar (referred to as a “4′-phosphate analog”). See, e.g., Intl. Patent Application Publication No. WO 2018/045317. In some embodiments, an oligonucleotide herein comprises a 4′-phosphate analog at a 5′-terminal nucleotide. In some embodiments, a phosphate analog is an oxymethyl phosphonate, in which the oxygen atom of the oxymethyl group is bound to the sugar moiety (e.g., at its 4′-carbon) or analog thereof. In other embodiments, a 4′-phosphate analog is a thiomethylphosphonate or an aminomethylphosphonate, in which the sulfur atom of the thiomethyl group or the nitrogen atom of the amino methyl group is bound to the 4′-carbon of the sugar moiety or analog thereof. In certain embodiments, a 4′-phosphate analog is an oxymethyl phosphonate. In some embodiments, an oxymethyl phosphonate is represented by the formula —O—CH₂—PO(OH)₂, —O—CH₂—PO(OR)₂, or —O—CH2-POOH(R), in which R is independently selected from H, CH₃, an alkyl group, CH₂CH₂CN, CH₂OCOC(CH₃)₃, CH₂OCH₂CH₂Si(CH₃)₃ or a protecting group. In certain embodiments, the alkyl group is CH₂CH₃. More typically, R is independently selected from H, CH₃ or CH₂CH₃. In some embodiment, R is CH3. In some embodiments, the 4′-phosphate analog is 4′-oxymethyl phosphonate.

[0538] In some embodiments, an oligonucleotide provided herein comprises an antisense strand comprising a 4′-phosphate analog at the 5′-terminal nucleotide, wherein 5′-terminal nucleotide comprises the following structure:

[chemical structure]

4′-O-monomethylphosphonate-2′-O-methyluridine phosphorothioate [MePhosphonate-4O-mUs].

### Modified Internucleotide Linkage

[0539] In some embodiments, an oligonucleotide provided herein (e.g., a RNAi oligonucleotide) comprises a modified internucleotide linkage. In some embodiments, phosphate modifications or substitutions result in an oligonucleotide that comprises at least about 1 (e.g., at least 1, at least 2, at least 3 or at least 5) modified internucleotide linkage. In some embodiments, any one of the oligonucleotides disclosed herein comprises about 1 to about 10 (e.g., 1 to 10, 2 to 8, 4 to 6, 3 to 10, 5 to 10, 1 to 5, 1 to 3 or 1 to 2) modified internucleotide linkages. In some embodiments, any one of the oligonucleotides disclosed herein comprises 1, 2, 3, 4, 5, 6, 7, 8, 9 or 10 modified internucleotide linkages.

[0540] A modified internucleotide linkage may be a phosphorodithioate linkage, a phosphorothioate linkage, a phosphotriester linkage, a thionoalkylphosphonate linkage, a thionalkylphosphotriester linkage, a phosphoramidite linkage, a phosphonate linkage or a boranophosphate linkage. In some embodiments, at least one modified internucleotide linkage of any one of the oligonucleotides as disclosed herein is a phosphorothioate linkage.

[0541] In some embodiments, an oligonucleotide provided herein (e.g., a RNAi oligonucleotide) has a phosphorothioate linkage between one or more of positions 1 and 2 of the sense strand, positions 1 and 2 of the antisense strand, positions 2 and 3 of the antisense strand, positions 3 and 4 of the antisense strand, positions 20 and 21 of the antisense strand, and positions 21 and 22 of the antisense strand. In some embodiments, the oligonucleotide described herein has a phosphorothioate linkage between each of positions 1 and 2 of the sense strand, positions 1 and 2 of the antisense strand, positions 2 and 3 of the antisense strand, positions 20 and 21 of the antisense strand, and positions 21 and 22 of the antisense strand. In some embodiments, the sense and antisense strands of an oligonucleotide comprise nucleotides sequences selected from the group consisting of:
[0542] (a) SEQ ID NOs: 483 and 724, respectively;
[0543] (b) SEQ ID NOs: 484 and 725, respectively;
[0544] (c) SEQ ID NOs: 486 and 727, respectively;
[0545] (d) SEQ ID NOs: 487 and 728, respectively;
[0546] (e) SEQ ID NOs: 488 and 729, respectively;
[0547] (f) SEQ ID NOs: 489 and 730, respectively;
[0548] (g) SEQ ID NOs: 490 and 731, respectively;
[0549] (h) SEQ ID NOs: 492 and 733, respectively;
[0550] (i) SEQ ID NOs: 493 and 734, respectively;
[0551] (j) SEQ ID NOs: 494 and 735, respectively;
[0552] (k) SEQ ID NOs: 495 and 736, respectively;
[0553] (l) SEQ ID NOs: 496 and 737, respectively;
[0554] (m) SEQ ID NOs: 497 and 738, respectively;
[0555] (n) SEQ ID NOs: 498 and 739, respectively;
[0556] (o) SEQ ID NOs: 499 and 740, respectively;
[0557] (p) SEQ ID NOs: 500 and 741, respectively;
[0558] (q) SEQ ID NOs: 501 and 742, respectively;
[0559] (r) SEQ ID NOs: 502 and 743, respectively;
[0560] (s) SEQ ID NOs: 503 and 744, respectively;
[0561] (t) SEQ ID NOs: 504 and 745, respectively;
[0562] (u) SEQ ID NOs: 505 and 746, respectively;
[0563] (v) SEQ ID NOs: 506 and 747, respectively;
[0564] (w) SEQ ID NOs: 507 and 748, respectively;
[0565] (x) SEQ ID NOs: 508 and 749, respectively;
[0566] (y) SEQ ID NOs: 509 and 750, respectively;
[0567] (z) SEQ ID NOs: 510 and 751, respectively;
[0568] (aa) SEQ ID NOs: 511 and 752, respectively;
[0569] (bb) SEQ ID NOs: 512 and 753, respectively;
[0570] (cc) SEQ ID NOs: 513 and 754, respectively;
[0571] (dd) SEQ ID NOs: 514 and 755, respectively;
[0572] (ee) SEQ ID NOs: 515 and 756, respectively;
[0573] (ff) SEQ ID NOs: 516 and 757, respectively;
[0574] (gg) SEQ ID NOs: 517 and 758, respectively;
[0575] (hh) SEQ ID NOs: 518 and 758, respectively; and,
[0576] (ii) SEQ ID NOs: 491 and 732, respectively,
   wherein the oligonucleotide comprises a modified internucleotide linkage.

[0577] In some embodiments, the oligonucleotide described herein has a phosphorothioate linkage between each of positions 1 and 2 of the sense strand, positions 1 and 2 of the antisense strand, positions 2 and 3 of the antisense strand, positions 20 and 21 of the antisense strand, and positions 21 and 22 of the antisense strand. In some embodiments, the oligonucleotide described herein has a phosphorothioate linkage between each of positions 1 and 2 of the sense strand, positions 1 and 2 of the antisense strand, positions 2 and 3 of the antisense strand, positions 3 and 4 of the antisense strand, positions 20 and 21 of the antisense strand, and positions 21 and 22 of the antisense strand. In some embodiments, the sense and antisense strands of an oligonucleotide comprise nucleotides sequences selected from the group consisting of:
[0578] (a) SEQ ID NOs: 484 and 725, respectively;
[0579] (b) SEQ ID NOs: 486 and 727, respectively;
[0580] (c) SEQ ID NOs: 487 and 728, respectively;
[0581] (d) SEQ ID NOs: 488 and 729, respectively;
[0582] (e) SEQ ID NOs: 489 and 730, respectively;
[0583] (f) SEQ ID NOs: 491 and 732, respectively; and,
[0584] (g) SEQ ID NOs: 502 and 743, respectively,
   wherein the oligonucleotide comprises a modified internucleotide linkage.

[0585] In some embodiments, the oligonucleotide described herein has a phosphorothioate linkage between each of positions 1 and 2 of the sense strand, positions 1 and 2 of the antisense strand, positions 2 and 3 of the antisense strand, positions 20 and 21 of the antisense strand, and positions 21 and 22 of the antisense strand. In some embodiments, the oligonucleotide described herein has a phosphorothioate linkage between each of positions 1 and 2 of the sense strand, positions 1 and 2 of the antisense strand, positions 2 and 3 of the antisense strand, positions 3 and 4 of the antisense strand, positions 20 and 21 of the antisense strand, and positions 21 and 22 of the antisense strand. In some embodiments, the sense and antisense strands of an oligonucleotide comprise nucleotides sequences selected from the group consisting of:
[0586] (a) SEQ ID NOs: 484 and 725, respectively;
[0587] (b) SEQ ID NOs: 487 and 728, respectively; and,
[0588] (c) SEQ ID NOs: 491 and 732, respectively,
   wherein the oligonucleotide comprises a modified internucleotide linkage.

### Base Modifications

[0589] In some embodiments, an oligonucleotide provided herein (e.g., an RNAi oligonucleotides) comprises one or more modified nucleobases. In some embodiments, modified nucleobases (also referred to herein as base analogs) are linked at the 1′ position of a nucleotide sugar moiety. In certain embodiments, a modified nucleobase is a nitrogenous base. In some embodiments, a modified nucleobase does not contain nitrogen atom. See, e.g., US Patent Application Publication No. 2008/0274462. In some embodiments, a modified nucleotide comprises a universal base. In some embodiments, a modified nucleotide does not contain a nucleobase (abasic). In some embodiments, the sense and antisense strands of an oligonucleotide comprise nucleotides sequences selected from the group consisting of:
[0590] (a) SEQ ID NOs: 483 and 724, respectively;
[0591] (b) SEQ ID NOs: 484 and 725, respectively;
[0592] (c) SEQ ID NOs: 486 and 727, respectively;
[0593] (d) SEQ ID NOs: 487 and 728, respectively;
[0594] (e) SEQ ID NOs: 488 and 729, respectively;
[0595] (f) SEQ ID NOs: 489 and 730, respectively;
[0596] (g) SEQ ID NOs: 490 and 731, respectively;
[0597] (h) SEQ ID NOs: 492 and 733, respectively;
[0598] (i) SEQ ID NOs: 493 and 734, respectively;
[0599] (j) SEQ ID NOs: 494 and 735, respectively;
[0600] (k) SEQ ID NOs: 495 and 736, respectively;
[0601] (l) SEQ ID NOs: 496 and 737, respectively;
[0602] (m) SEQ ID NOs: 497 and 738, respectively;
[0603] (n) SEQ ID NOs: 498 and 739, respectively;
[0604] (o) SEQ ID NOs: 499 and 740, respectively;
[0605] (p) SEQ ID NOs: 500 and 741, respectively;
[0606] (q) SEQ ID NOs: 501 and 742, respectively;
[0607] (r) SEQ ID NOs: 502 and 743, respectively;
[0608] (s) SEQ ID NOs: 503 and 744, respectively;
[0609] (t) SEQ ID NOs: 504 and 745, respectively;
[0610] (u) SEQ ID NOs: 505 and 746, respectively;
[0611] (v) SEQ ID NOs: 506 and 747, respectively;
[0612] (w) SEQ ID NOs: 507 and 748, respectively;
[0613] (x) SEQ ID NOs: 508 and 749, respectively;
[0614] (y) SEQ ID NOs: 509 and 750, respectively;
[0615] (z) SEQ ID NOs: 510 and 751, respectively;
[0616] (aa) SEQ ID NOs: 511 and 752, respectively;
[0617] (bb) SEQ ID NOs: 512 and 753, respectively;
[0618] (cc) SEQ ID NOs: 513 and 754, respectively;
[0619] (dd) SEQ ID NOs: 514 and 755, respectively;
[0620] (ee) SEQ ID NOs: 515 and 756, respectively;
[0621] (ff) SEQ ID NOs: 516 and 757, respectively;
[0622] (gg) SEQ ID NOs: 517 and 758, respectively;
[0623] (hh) SEQ ID NOs: 518 and 758, respectively; and,
[0624] (ii) SEQ ID NOs: 491 and 732, respectively.
   wherein the oligonucleotide comprises one or more modified nucleobases.

[0625] In some embodiments, a modified nucleotide comprises a universal base. In some embodiments, a modified nucleotide does not contain a nucleobase (abasic). In some embodiments, the sense and antisense strands of an oligonucleotide comprise nucleotides sequences selected from the group consisting of:
[0626] (a) SEQ ID NOs: 484 and 725, respectively;
[0627] (b) SEQ ID NOs: 486 and 727, respectively;
[0628] (c) SEQ ID NOs: 487 and 728, respectively;
[0629] (d) SEQ ID NOs: 488 and 729, respectively;
[0630] (e) SEQ ID NOs: 489 and 730, respectively;
[0631] (f) SEQ ID NOs: 491 and 732, respectively; and,
[0632] (g) SEQ ID NOs: 502 and 743, respectively,
   wherein the oligonucleotide comprises one or more modified nucleobases.

[0633] In some embodiments, a modified nucleotide comprises a universal base. In some embodiments, a modified nucleotide does not contain a nucleobase (abasic). In some embodiments, the sense and antisense strands of an oligonucleotide comprise nucleotides sequences selected from the group consisting of:
[0634] (a) SEQ ID NOs: 484 and 725, respectively;
[0635] (b) SEQ ID NOs: 487 and 728, respectively; and,
[0636] (c) SEQ ID NOs: 491 and 732, respectively,
   wherein the oligonucleotide comprises one or more modified nucleobases.

[0637] In some embodiments, a universal base is a heterocyclic moiety located at the 1′ position of a nucleotide sugar moiety in a modified nucleotide, or the equivalent position in a nucleotide sugar moiety substitution, that, when present in a duplex, can be positioned opposite more than one type of base without substantially altering structure of the duplex. In some embodiments, compared to a reference single-stranded nucleic acid (e.g., oligonucleotide) that is fully complementary to a target nucleic acid (e.g., a CD274 mRNA), a single-stranded nucleic acid containing a universal base forms a duplex with the target nucleic acid that has a lower Tₘ than a duplex formed with the complementary nucleic acid. In some embodiments, when compared to a reference single-stranded nucleic acid in which the universal base has been replaced with a base to generate a single mismatch, the single-stranded nucleic acid containing the universal base forms a duplex with the target nucleic acid that has a higher Tₘ than a duplex formed with the nucleic acid comprising the mismatched base.

[0638] Non-limiting examples of universal-binding nucleotides include, but are not limited to, inosine, 1-β-D-ribofuranosyl-5-nitroindole and/or 1-β-D-ribofuranosyl-3-nitropyrrole (see, US Patent Application Publication No. 2007/0254362; Van Aerschot et al. (1995) NUCLEIC ACIDS RES. 23:4363-4370; Loakes et al. (1995) NUCLEIC ACIDS RES. 23:2361-66; and Loakes & Brown (1994) NUCLEIC ACIDS RES. 22:4039-43).

### Targeting Ligands

[0639] In some embodiments, it is desirable to target an oligonucleotide provided herein (e.g., an RNAi oligonucleotide) to one or more cells or cell type, tissues, organs, or anatomical regions or compartments. Such a strategy may help to avoid undesirable effects to the organism treated and/or to avoid undue loss of the oligonucleotide to cells, tissues, organs, or anatomical regions or compartments that would not benefit from the oligonucleotide or its effects (e.g., inhibition or reduction of CD274 expression). Accordingly, in some embodiments, oligonucleotides disclosed herein (e.g., RNAi oligonucleotides) are modified to facilitate targeting and/or delivery to particular cells or cell types, tissues, organs, or anatomical regions or compartments (e.g., to facilitate delivery of the oligonucleotide to tumor). In some embodiments, an oligonucleotide comprises at least one nucleotide (e.g., 1, 2, 3, 4, 5, 6 or more nucleotides) conjugated to one or more targeting ligand(s). In some embodiments, the sense and antisense strands of an oligonucleotide comprise nucleotides sequences selected from the group consisting of:
[0640] (a) SEQ ID NOs: 483 and 724, respectively;
[0641] (b) SEQ ID NOs: 484 and 725, respectively;
[0642] (c) SEQ ID NOs: 486 and 727, respectively;
[0643] (d) SEQ ID NOs: 487 and 728, respectively;
[0644] (e) SEQ ID NOs: 488 and 729, respectively;
[0645] (f) SEQ ID NOs: 489 and 730, respectively;
[0646] (g) SEQ ID NOs: 490 and 731, respectively;
[0647] (h) SEQ ID NOs: 492 and 733, respectively;
[0648] (i) SEQ ID NOs: 493 and 734, respectively;
[0649] (j) SEQ ID NOs: 494 and 735, respectively;
[0650] (k) SEQ ID NOs: 495 and 736, respectively;
[0651] (l) SEQ ID NOs: 496 and 737, respectively;
[0652] (m) SEQ ID NOs: 497 and 738, respectively;
[0653] (n) SEQ ID NOs: 498 and 739, respectively;
[0654] (o) SEQ ID NOs: 499 and 740, respectively;
[0655] (p) SEQ ID NOs: 500 and 741, respectively;
[0656] (q) SEQ ID NOs: 501 and 742, respectively;
[0657] (r) SEQ ID NOs: 502 and 743, respectively;
[0658] (s) SEQ ID NOs: 503 and 744, respectively;
[0659] (t) SEQ ID NOs: 504 and 745, respectively;
[0660] (u) SEQ ID NOs: 505 and 746, respectively;
[0661] (v) SEQ ID NOs: 506 and 747, respectively;
[0662] (w) SEQ ID NOs: 507 and 748, respectively;
[0663] (x) SEQ ID NOs: 508 and 749, respectively;
[0664] (y) SEQ ID NOs: 509 and 750, respectively;
[0665] (z) SEQ ID NOs: 510 and 751, respectively;
[0666] (aa) SEQ ID NOs: 511 and 752, respectively;
[0667] (bb) SEQ ID NOs: 512 and 753, respectively;
[0668] (cc) SEQ ID NOs: 513 and 754, respectively;
[0669] (dd) SEQ ID NOs: 514 and 755, respectively;
[0670] (ee) SEQ ID NOs: 515 and 756, respectively;
[0671] (ff) SEQ ID NOs: 516 and 757, respectively;
[0672] (gg) SEQ ID NOs: 517 and 758, respectively;
[0673] (hh) SEQ ID NOs: 518 and 758, respectively; and,
[0674] (ii) SEQ ID NOs: 491 and 732, respectively,
   wherein the oligonucleotide comprises a targeting ligand conjugated to at least one nucleotide.

[0675] In some embodiments, an oligonucleotide comprises at least one nucleotide (e.g., 1, 2, 3, 4, 5, 6 or more nucleotides) conjugated to one or more targeting ligand(s). In some embodiments, the sense and antisense strands of an oligonucleotide comprise nucleotides sequences selected from the group consisting of:
[0676] (a) SEQ ID NOs: 484 and 725, respectively;
[0677] (b) SEQ ID NOs: 486 and 727, respectively;
[0678] (c) SEQ ID NOs: 487 and 728, respectively;
[0679] (d) SEQ ID NOs: 488 and 729, respectively;
[0680] (e) SEQ ID NOs: 489 and 730, respectively;
[0681] (f) SEQ ID NOs: 491 and 732, respectively; and,
[0682] (g) SEQ ID NOs: 502 and 743, respectively,
   wherein the oligonucleotide comprises a targeting ligand conjugated to at least one nucleotide.

[0683] In some embodiments, the sense and antisense strands of an oligonucleotide comprise nucleotides sequences of:
[0684] (a) SEQ ID NOs: 484 and 725, respectively;
[0685] (b) SEQ ID NOs: 487 and 728, respectively; and,
[0686] (c) SEQ ID NOs: 491 and 732, respectively,
   wherein the oligonucleotide comprises a targeting ligand conjugated to at least one nucleotide.

[0687] In some embodiments, the targeting ligand comprises a carbohydrate, amino sugar, cholesterol, peptide, polypeptide, protein, or part of a protein (e.g., an antibody or antibody fragment), or lipid. In certain embodiments, the targeting ligand is a carbohydrate comprising at least one GalNAc moiety.

[0688] In some embodiments, 1 or more (e.g., 1, 2, 3, 4, 5 or 6) nucleotides of an oligonucleotide provided herein (e.g., an RNAi oligonucleotide) are each conjugated to a separate targeting ligand (e.g., a GalNAc moiety). In some embodiments, 2 to 4 nucleotides of an oligonucleotide are each conjugated to a separate targeting ligand. In some embodiments, targeting ligands are conjugated to 2 to 4 nucleotides at either ends of the sense or antisense strand (e.g., targeting ligands are conjugated to a 2 to 4 nucleotide overhang or extension on the 5′ or 3′ terminus of the sense or antisense strand) such that the targeting ligands resemble bristles of a toothbrush and the oligonucleotide resembles a toothbrush. For example, an oligonucleotide may comprise a stem-loop at either the 5′ or 3′ terminus of the sense strand and 1, 2, 3 or 4 nucleotides of the loop of the stem may be individually conjugated to a targeting ligand. In some embodiments, an oligonucleotide provided by the disclosure (e.g., a RNAi oligonucleotide) comprises a stem-loop at the 3′ terminus of the sense strand, wherein the loop of the stem-loop comprises a triloop or a tetraloop, and wherein the 3 or 4 nucleotides comprising the triloop or tetraloop, respectively, are individually conjugated to a targeting ligand. In some embodiments, an oligonucleotide provided by the disclosure (e.g., a RNAi oligonucleotide) comprises a stem-loop at the 3′ terminus of the sense strand, wherein the loop of the stem-loop comprises a tetraloop, and wherein 3 nucleotides of the tetraloop are individually conjugated to a targeting ligand.

a. GalNAc Targeting Ligands

[0689] GalNAc is a high affinity carbohydrate ligand for the asialoglycoprotein receptor (ASGPR), which is primarily expressed on the surface of hepatocyte cells and has a major role in binding, internalizing and subsequent clearing circulating glycoproteins that contain terminal galactose or GalNAc residues (asialoglycoproteins). Conjugation (either indirect or direct) of GalNAc moieties to oligonucleotides of the instant disclosure can be used to target these oligonucleotides to the ASGPR expressed on cells. In some embodiments, an oligonucleotide of the instant disclosure (e.g., an RNAi oligonucleotide) is conjugated to at least one or more GalNAc moieties, wherein the GalNAc moieties target the oligonucleotide to an ASGPR expressed on human liver cells (e.g., human hepatocytes). In some embodiments, the GalNAc moiety target the oligonucleotide to the liver.

[0690] In some embodiments, an oligonucleotide of the instant disclosure (e.g., an RNAi oligonucleotide) is conjugated directly or indirectly to a monovalent GalNAc moiety. In some embodiments, the oligonucleotide is conjugated directly or indirectly to more than one monovalent GalNAc (i.e., is conjugated to 2, 3 or 4 monovalent GalNAc moieties and is typically conjugated to 3 or 4 monovalent GalNAc moieties). In some embodiments, an oligonucleotide is conjugated to one or more bivalent GalNAc, trivalent GalNAc or tetravalent GalNAc moieties. In some embodiments, a bivalent, trivalent or tetravalent GalNAc moiety is conjugated to an oligonucleotide via a branched linker. In some embodiments, a monovalent GalNAc moiety is conjugated to a first nucleotide and a bivalent, trivalent, or tetravalent GalNAc moiety is conjugated to a second nucleotide via a branched linker.

[0691] In some embodiments, one (1) or more (e.g., 1, 2, 3, 4, 5 or 6) nucleotides of an oligonucleotide described herein (e.g., an RNAi oligonucleotide) are each conjugated to a GalNAc moiety. In some embodiments, two (2) to four (4) nucleotides of a tetraloop are each conjugated to a separate GalNAc moiety. In some embodiments, one (1) to three (3) nucleotides of a triloop are each conjugated to a separate GalNAc moiety. In some embodiments, targeting ligands are conjugated to two (2) to four (4) nucleotides at either ends of the sense or antisense strand (e.g., ligands are conjugated to a two (2) to four (4) nucleotide overhang or extension on the 5′ or 3′ terminus of the sense or antisense strand) such that the GalNAc moieties resemble bristles of a toothbrush and the oligonucleotide resembles a toothbrush. In some embodiments, GalNAc moieties are conjugated to a nucleotide of the sense strand. For example, three (3) or four (4) GalNAc moieties can be conjugated to nucleotides in the tetraloop of the sense strand where each GalNAc moiety is conjugated to one (1) nucleotide.

[0692] In some embodiments, an oligonucleotide described herein (e.g., an RNAi oligonucleotide) comprises a tetraloop, wherein the tetraloop (L) is any combination of adenine (A) and guanine (G) nucleotides. In some embodiments, the tetraloop (L) comprises a monovalent GalNAc moiety attached to any one or more guanine (G) nucleotides of the tetraloop via any linker described herein, as depicted below (X=heteroatom):

[chemical structure]

In some embodiments, the tetraloop (L) has a monovalent GalNAc attached to any one or more adenine nucleotides of the tetraloop via any linker described herein, as depicted below (X=heteroatom):

[chemical structure]

[0693] In some embodiments, an oligonucleotide herein (e.g., an RNAi oligonucleotide) comprises a monovalent GalNAc moiety attached to a guanine (G) nucleotide referred to as [ademG-GalNAc] or 2′-aminodiethoxymethanol-Guanine-GalNAc, as depicted below:

[chemical structure]

[0694] In some embodiments, an oligonucleotide herein comprises a monovalent GalNAc moiety attached to an adenine nucleotide, referred to as [ademA-GalNAc] or 2′-aminodiethoxymethanol-Adenine-GalNAc, as depicted below:

[chemical structure]

An example of such conjugation is shown below for a loop comprising from 5′ to 3′ the nucleotide sequence GAAA (L=linker, X=heteroatom). Such a loop may be present, for example, at positions 27-30 of a sense strand provided herein. In the chemical formula,

[chemical structure]

is used to describe an attachment point to the oligonucleotide strand.

[chemical structure]

Appropriate methods or chemistry (e.g., click chemistry) can be used to link a targeting ligand to a nucleotide. In some embodiments, a targeting ligand is conjugated to a nucleotide comprising an oligonucleotide herein (e.g., an RNAi oligonucleotide) using a click linker. In some embodiments, an acetal-based linker is used to conjugate a targeting ligand to a nucleotide of any one of the oligonucleotides described herein. Acetal-based linkers are disclosed, for example, in Intl. Patent Application Publication No. WO2016/100401. In some embodiments, the linker is a labile linker. However, in other embodiments, the linker is stable. An example is shown below for a loop comprising from 5′ to 3′ the nucleotides GAAA, in which GalNAc moieties are attached to nucleotides of the loop using an acetal linker. Such a loop may be present, for example, at positions 27-30 of the any one of the sense strands. In the chemical formula,

[chemical structure]

is an attachment point to the oligonucleotide strand.

[chemical structure]

[chemical structure]

As mentioned various appropriate methods or chemistry synthetic techniques (e.g., click chemistry) can be used to link a targeting ligand to a nucleotide. In some embodiments, a targeting ligand is conjugated to a nucleotide using a click linker. In some embodiments, an acetal-based linker is used to conjugate a targeting ligand to a nucleotide of any one of the oligonucleotides described herein. Acetal-based linkers are disclosed, for example, in Intl. Patent Application Publication No. WO 2016/100401. In some embodiments, the linker is a labile linker. However, in other embodiments, the linker is a stable linker.

[0695] In some embodiments, a duplex extension (e.g., of up to 3, 4, 5 or 6 bp in length) is provided between a targeting ligand (e.g., a GalNAc moiety) and the oligonucleotide. In some embodiments, the oligonucleotides herein (e.g., RNAi oligonucleotides) do not have a GalNAc conjugated thereto.

[0696] In some embodiments, the sense and antisense strands of an oligonucleotide comprise nucleotides sequences selected from the group consisting of:
[0697] (a) SEQ ID NOs: 483 and 724, respectively;
[0698] (b) SEQ ID NOs: 484 and 725, respectively;
[0699] (c) SEQ ID NOs: 486 and 727, respectively;
[0700] (d) SEQ ID NOs: 487 and 728, respectively;
[0701] (e) SEQ ID NOs: 488 and 729, respectively;
[0702] (f) SEQ ID NOs: 489 and 730, respectively;
[0703] (g) SEQ ID NOs: 490 and 731, respectively;
[0704] (h) SEQ ID NOs: 492 and 733, respectively;
[0705] (i) SEQ ID NOs: 493 and 734, respectively;
[0706] (j) SEQ ID NOs: 494 and 735, respectively;
[0707] (k) SEQ ID NOs: 495 and 736, respectively;
[0708] (l) SEQ ID NOs: 496 and 737, respectively;
[0709] (m) SEQ ID NOs: 497 and 738, respectively;
[0710] (n) SEQ ID NOs: 498 and 739, respectively;
[0711] (o) SEQ ID NOs: 499 and 740, respectively;
[0712] (p) SEQ ID NOs: 500 and 741, respectively;
[0713] (q) SEQ ID NOs: 501 and 742, respectively;
[0714] (r) SEQ ID NOs: 502 and 743, respectively;
[0715] (s) SEQ ID NOs: 503 and 744, respectively;
[0716] (t) SEQ ID NOs: 504 and 745, respectively;
[0717] (u) SEQ ID NOs: 505 and 746, respectively;
[0718] (v) SEQ ID NOs: 506 and 747, respectively;
[0719] (w) SEQ ID NOs: 507 and 748, respectively;
[0720] (x) SEQ ID NOs: 508 and 749, respectively;
[0721] (y) SEQ ID NOs: 509 and 750, respectively;
[0722] (z) SEQ ID NOs: 510 and 751, respectively;
[0723] (aa) SEQ ID NOs: 511 and 752, respectively;
[0724] (bb) SEQ ID NOs: 512 and 753, respectively;
[0725] (cc) SEQ ID NOs: 513 and 754, respectively;
[0726] (dd) SEQ ID NOs: 514 and 755, respectively;
[0727] (ee) SEQ ID NOs: 515 and 756, respectively;
[0728] (ff) SEQ ID NOs: 516 and 757, respectively;
[0729] (gg) SEQ ID NOs: 517 and 758, respectively;
[0730] (hh) SEQ ID NOs: 518 and 758, respectively; and,
[0731] (ii) SEQ ID NOs: 491 and 732, respectively,
   wherein the oligonucleotide comprises at least one GalNAc moiety conjugated to a nucleotide.

[0732] In some embodiments, the sense and antisense strands of an oligonucleotide comprise nucleotides sequences selected from the group consisting of:
[0733] (a) SEQ ID NOs: 484 and 725, respectively;
[0734] (b) SEQ ID NOs: 486 and 727, respectively;
[0735] (c) SEQ ID NOs: 487 and 728, respectively;
[0736] (d) SEQ ID NOs: 488 and 729, respectively;
[0737] (e) SEQ ID NOs: 489 and 730, respectively;
[0738] (f) SEQ ID NOs: 491 and 732, respectively; and,
[0739] (g) SEQ ID NOs: 502 and 743, respectively,
   wherein the oligonucleotide comprises at least one GalNAc moiety conjugated to a nucleotide.
   b. Lipid Targeting Ligands

[0740] In some embodiments, the disclosure provides an oligonucleotide-ligand conjugate comprising an oligonucleotide comprising nucleotide sequence for inhibiting expression of a target mRNA expressed in tumor (e.g., CD274) and one or more targeting ligands conjugated to the oligonucleotide. In some embodiments, an oligonucleotide-ligand conjugate described herein comprises a nucleotide sequence and one or more targeting ligands, wherein the nucleotide sequence comprises one or more nucleosides (nucleic acids) conjugated with one or more targeting ligands represented by formula I-a:

[chemical structure]

or a pharmaceutically acceptable salt thereof,
wherein:
[0741] B is a nucleobase or hydrogen;
[0742] R¹ and R² are independently hydrogen, halogen, R^{A}, —CN, —S(O)R, —S(O)₂R, —Si(OR)₂R, —Si(OR)R₂, or —SiR₃; or
[0743] R¹ and R² on the same carbon are taken together with their intervening atoms to form a 3-7 membered saturated or partially unsaturated ring having 0-3 heteroatoms, independently selected from nitrogen, oxygen, and sulfur;
[0744] each R^{A} is independently an optionally substituted group selected from C₁₋₆ aliphatic, phenyl, a 4-7 membered saturated or partially unsaturated heterocyclic ring having 1-2 heteroatoms independently selected from nitrogen, oxygen, and sulfur, and a 5-6 membered heteroaryl ring having 1-4 heteroatoms independently selected from nitrogen, oxygen, and sulfur;
[0745] each R is independently hydrogen, a suitable protecting group, or an optionally substituted group selected from C₁₋₆ aliphatic, phenyl, a 4-7 membered saturated or partially unsaturated heterocyclic having 1-2 heteroatoms independently selected from nitrogen, oxygen, and sulfur, and a 5-6 membered heteroaryl ring having 1-4 heteroatoms independently selected from nitrogen, oxygen, and sulfur; or
[0746] two R groups on the same atom are taken together with their intervening atoms to form a 4-7 membered saturated, partially unsaturated, or heteroaryl ring having 0-3 heteroatoms, independently selected from nitrogen, oxygen, silicon, and sulfur;
[0747] each targeting ligand is a lipid conjugate moiety (LC); and wherein each LC is independently a lipid conjugate moiety comprising a saturated or unsaturated, straight, or branched C₁₋₅₀ hydrocarbon chain, wherein 0-10 methylene units of the hydrocarbon chain are independently replaced by -Cy-, —O—, —C(O)NR—, —NR—, —S—, —C(O)—, —C(O)O—, —S(O)—, —S(O)₂—, —P(O)OR—, —P(S)OR—;
[0748] each -Cy- is independently an optionally substituted bivalent ring selected from phenylenyl, an 8-10 membered bicyclic arylenyl, a 4-7 membered saturated or partially unsaturated carbocyclylenyl, a 4-11 membered saturated or partially unsaturated spiro carbocyclylenyl, an 8-10 membered bicyclic saturated or partially unsaturated carbocyclylenyl, a 4-7 membered saturated or partially unsaturated heterocyclylenyl having 1-3 heteroatoms independently selected from nitrogen, oxygen, and sulfur, a 4-11 membered saturated or partially unsaturated spiro heterocyclylenyl having 1-2 heteroatoms independently selected from nitrogen, oxygen, and sulfur, an 8-10 membered bicyclic saturated or partially unsaturated heterocyclylenyl having 1-2 heteroatoms independently selected from nitrogen, oxygen, and sulfur, a 5-6 membered heteroarylenyl having 1-4 heteroatoms independently selected from nitrogen, oxygen, and sulfur, or an 8-10 membered bicyclic heteroarylenyl having 1-5 heteroatoms independently selected from nitrogen, oxygen, or sulfur;
[0749] n is 1-10;
[0750] L is a covalent bond or a bivalent saturated or unsaturated, straight or branched C₁₋₅₀ hydrocarbon chain, wherein 0-10 methylene units of the hydrocarbon chain are independently replaced by -Cy-, —O—, —C(O)NR—, —NR—, —S—, —C(O)—, —C(O)O—, —S(O)—, —S(O)₂—, —P(O)OR—, —P(S)OR—, —V¹CR²W¹—, or

[chemical structure]

[0751] m is 1-50;
[0752] X¹, V¹ and W¹ are independently —C(R)₂—, —OR, —O—, —S—, —Se—, or —NR—;
[0753] Y is hydrogen, a suitable hydroxyl protecting group,

[chemical structure]

[0754] R³ is hydrogen, a suitable protecting group, a suitable prodrug, or an optionally substituted group selected from C₁₋₆ aliphatic, phenyl, a 4-7 membered saturated or partially unsaturated heterocyclic ring having 1-2 heteroatoms independently selected from nitrogen, oxygen, and sulfur, and a 5-6 membered heteroaryl ring having 1-4 heteroatoms independently selected from nitrogen, oxygen, and sulfur;
[0755] X² is O, S, or NR;
[0756] X³ is —O—, —S—, —BH₂—, or a covalent bond;
[0757] Y¹ is a linking group attaching to the 2′- or 3′-terminal of a nucleoside, a nucleotide, or an oligonucleotide;
[0758] Y² is hydrogen, a suitable protecting group, a phosphoramidite analogue, an internucleotide linking group attaching to the 5′-terminal of a nucleoside, a nucleotide, or an oligonucleotide, or a linking group attaching to a solid support; and
[0759] Z is —O—, —S—, —NR—, or —CR₂—.

[0760] In some embodiments, the oligonucleotide-ligand conjugate comprises one or more nucleic acids conjugated with targeting ligands represented by formula II-a:

[chemical structure]

or a pharmaceutically acceptable salt thereof.

[0761] In some embodiments, the oligonucleotide-ligand conjugate comprises one or more nucleic acids conjugated with targeting ligands represented by formula II-b or II-c:

[chemical structure]

or a pharmaceutically acceptable salt thereof, wherein:
[0762] L¹ is a covalent bond, a monovalent or a bivalent saturated or unsaturated, straight or branched C₁₋₅₀ hydrocarbon chain, wherein 0-10 methylene units of the hydrocarbon chain are independently replaced by -Cy-, —O—, —C(O)NR—, —NR—, —S—, —C(O)—, —C(O)O—, —S(O)—, —S(O)₂—, —P(O)OR—, —P(S)OR—, or

[chemical structure]

[0763] R⁴ is hydrogen, R^{A}, or a suitable amine protection group; and
[0764] R⁵ is adamantyl, or a saturated or unsaturated, straight, or branched C₁₋₅₀ hydrocarbon chain, wherein 0-10 methylene units of the hydrocarbon chain are independently replaced by —O—, —C(O)NR—, —NR—, —S—, —C(O)—, —C(O)O—, —S(O)—, —S(O)₂—, —P(O)OR—, or —P(S)OR.

[0765] In some embodiments, R⁵ is selected from

[chemical structure]

[0766] In some embodiments, R⁵ is selected from:

[chemical structure]

[0767] In some embodiments, R⁵ is

[chemical structure]

[0768] In some embodiments, R⁵ is

[chemical structure]

In some embodiments, R⁵ is

[chemical structure]

In some embodiments, R⁵ is

[chemical structure]

In some embodiments, R⁵ is

[chemical structure]

In some embodiments, R⁵ is

[chemical structure]

In some embodiments, R5 is

[chemical structure]

In some embodiments, R⁵ is

[chemical structure]

In some embodiments, R⁵ is

[chemical structure]

In some embodiments, R⁵ is

[chemical structure]

In some embodiments, R⁵ is

[chemical structure]

In some embodiments, R⁵ is

[chemical structure]

In some embodiments, R⁵ is

[chemical structure]

In some embodiments, R⁵ is

[chemical structure]

[0769] In some embodiments, the oligonucleotide-ligand conjugate comprises one or more nucleic acids conjugated with targeting ligands represented by formula II-Ib or II-Ic:

[chemical structure]

or a pharmaceutically acceptable salt thereof; wherein
[0770] B is a nucleobase or hydrogen;
[0771] m is 1-50;
[0772] X¹ is —O—, or —S—;
[0773] Y is hydrogen,

[chemical structure]

[0774] R³ is hydrogen, or a suitable protecting group;
[0775] X² is O, or S;
[0776] X³ is —O—, —S—, or a covalent bond;
[0777] Y¹ is a linking group attaching to the 2′- or 3′-terminal of a nucleoside, a nucleotide, or an oligonucleotide;
[0778] Y² is hydrogen, a phosphoramidite analogue, an internucleotide linking group attaching to the 5′-terminal of a nucleoside, a nucleotide, or an oligonucleotide, or a linking group attaching to a solid support;
[0779] R⁵ is adamantyl, or a saturated or unsaturated, straight, or branched C1-50 hydrocarbon chain, wherein 0-10 methylene units of the hydrocarbon chain are independently replaced by —O—, —C(O)NR—, —NR—, —S—, —C(O)—, —C(O)O—, —S(O)—, —S(O)₂—, —P(O)OR—, or —P(S)OR—; and
[0780] R is hydrogen, a suitable protecting group, or an optionally substituted group selected from C₁₋₆ aliphatic, phenyl, a 4-7 membered saturated or partially unsaturated heterocyclic having 1-2 heteroatoms independently selected from nitrogen, oxygen, and sulfur, and a 5-6 membered heteroaryl ring having 1-4 heteroatoms independently selected from nitrogen, oxygen, and sulfur.

[0781] In some embodiments, R⁵ is selected from

[chemical structure]

[0782] In some embodiments, R⁵ is

[chemical structure]

[0783] In some embodiments, the nucleotide sequence of the oligonucleotide comprises 1-10 targeting ligands. In some embodiments, the nucleotide sequence comprises 1, 2 or 3 targeting ligands. In some embodiments, the nucleotide sequence comprises 1 targeting ligand.

[0784] In some embodiments, the oligonucleotide of the oligonucleotide-ligand conjugate is a double-stranded molecule. In some embodiments, the oligonucleotide is an RNAi molecule. In some embodiments, the double stranded oligonucleotide comprises a stem loop. In some embodiments, the ligand is conjugated to any of the nucleotides in the stem loop. In some embodiments, the ligand is conjugated to the first nucleotide from 5′ to 3′, in the stem loop. In some embodiments, the ligand is conjugated to the second nucleotide from 5′ to 3′ in the stem loop. In some embodiments, the ligand is conjugated to the third nucleotide from 5′ to 3′ in the stem loop. In some embodiments, the ligand is conjugated to the fourth nucleotide from 5′ to 3′ in the stem loop. In some embodiments, the ligand is conjugated to one, two, three, or four of the nucleotides in the stem loop. In some embodiments, the ligand is conjugated to three of the nucleotides in the stem loop.

[0785] In some embodiments, the oligonucleotide-ligand conjugate comprises a sense strand of 36 nucleotides with positions numbered 1-36 from 5′ to 3′. In some embodiments, the oligonucleotide-ligand conjugate comprises a lipid conjugated to position 1 of a 36-nucleotide sense strand. In some embodiments, the oligonucleotide-ligand conjugate comprises a lipid conjugated to the 5′ terminal nucleotide of the sense strand. In some embodiments, the oligonucleotide-ligand conjugate comprises a lipid conjugated to the 5′ terminal nucleotide of a 36-nucleotide sense strand. In some embodiments, the oligonucleotide-ligand conjugate comprises a lipid conjugated to position 27 of a 36-nucleotide sense strand. In some embodiments, the oligonucleotide-ligand conjugate comprises a lipid conjugated to position 28 of a 36-nucleotide sense strand. In some embodiments, the oligonucleotide conjugate comprises a lipid conjugated to position 29 of a 36-nucleotide sense strand. In some embodiments, the oligonucleotide conjugate comprises a lipid conjugated to position 30 of a 36-nucleotide sense strand.

[0786] In some embodiments, the oligonucleotide-ligand conjugate comprises a C8-C30 hydrocarbon chain conjugated to position 1 of a 36-nucleotide sense strand. In some embodiments, the oligonucleotide-ligand conjugate comprises a C22 hydrocarbon chain conjugated to position 1 of a 36-nucleotide sense strand.

[0787] In some embodiments, the oligonucleotide-ligand conjugate comprises a lipid conjugated to the 5′ terminal nucleotide of the sense strand. In some embodiments, the oligonucleotide-ligand conjugate comprises a C8-C30 hydrocarbon chain conjugated to the 5′terminal nucleotide of the sense strand. In some embodiments, the oligonucleotide-ligand conjugate comprises a C22 hydrocarbon chain conjugated to the 5′ terminal nucleotide of the sense strand. In some embodiments, the oligonucleotide-ligand conjugate comprises a C18 hydrocarbon chain conjugated to the 5′ terminal nucleotide of the sense strand.

[0788] In some embodiments, the oligonucleotide-ligand conjugate comprises a hydrocarbon chain conjugated to the 2′ carbon of the ribose ring of the 5′ terminal nucleotide of the sense strand. In some embodiments, the oligonucleotide-ligand conjugate comprises a C8-C30 hydrocarbon chain conjugated to the 2′ carbon of the ribose ring of the 5′ terminal nucleotide of the sense strand. In some embodiments, the oligonucleotide-ligand conjugate comprises a C22 hydrocarbon chain conjugated to the 2′ carbon of the ribose ring of the 5′ terminal nucleotide of the sense strand. In some embodiments, the oligonucleotide-ligand conjugate comprises a C18 hydrocarbon chain conjugated to the 2′ carbon of the ribose ring of the 5′ terminal nucleotide of the sense strand.

[0789] In some embodiments, the oligonucleotide-ligand conjugate comprises a lipid conjugated to the 5′ terminal nucleotide of the sense strand via a linker. In some embodiments, the oligonucleotide-ligand conjugate comprises a C8-C30 hydrocarbon chain conjugated to the 5′terminal nucleotide of the sense strand via a linker. In some embodiments, the oligonucleotide-ligand conjugate comprises a C22 hydrocarbon chain conjugated to the 5′ terminal nucleotide of the sense strand via a linker. In some embodiments, the oligonucleotide-ligand conjugate comprises a C18 hydrocarbon chain conjugated to the 5′ terminal nucleotide of the sense strand via a linker.

[0790] In some embodiments, the oligonucleotide-ligand conjugate comprises a hydrocarbon chain conjugated to the 2′ carbon of the ribose ring of the 5′ terminal nucleotide of the sense strand via a linker. In some embodiments, the oligonucleotide-ligand conjugate comprises a C8-C30 hydrocarbon chain conjugated to the 2′ carbon of the ribose ring of the 5′ terminal nucleotide of the sense strand via a linker. In some embodiments, the oligonucleotide-ligand conjugate comprises a C22 hydrocarbon chain conjugated to the 2′ carbon of the ribose ring of the 5′ terminal nucleotide of the sense strand via a linker. In some embodiments, the oligonucleotide-ligand conjugate comprises a C18 hydrocarbon chain conjugated to the 2′ carbon of the ribose ring of the 5′ terminal nucleotide of the sense strand via a linker.

[0791] In some embodiments, an oligonucleotide-ligand conjugate comprises an antisense strand of 15 to 30 nucleotides and a sense strand of 15 to 40 nucleotide, wherein the sense and antisense strands form a duplex region, wherein the antisense strand comprises a region of complementarity to a target sequence expressed in the adrenal gland or adrenal cortex, wherein the sense strand comprises at its 3′ end a stem-loop comprising a tetraloop comprising 4 nucleosides, wherein one or more of the 4 nucleosides is represented by formula II-Ib:

[chemical structure]

wherein B is selected from an adenine and a guanine nucleobase, and wherein R⁵ is a hydrocarbon chain. In some embodiments, m is 1, X1 is O, Y2 is an internucleotide linking group attaching to the 5′ terminal of a nucleoside,

[0792] Y is represented by

[chemical structure]

Y1 is a linking group attaching to the 2′ or 3′ terminal of a nucleotide, X2 is O, X3 is O, and R3 is H. In some embodiments, the hydrocarbon chain is a C8-C30 hydrocarbon chain. In some embodiments, the hydrocarbon chain is a C22 hydrocarbon chain. In some embodiments, the C22 hydrocarbon chain is represented by

[chemical structure]

[0793] In some embodiments, the 4 nucleosides of the tetraloop are numbered 1-4 from 5′ to 3′ and position 1 is represented by formula II-Ib. In some embodiments, position 2 is represented by formula II-Ib. In some embodiments, position 3 is represented by formula II-Ib. In some embodiments, position 4 is represented by formula II-Ib. In some embodiments, the sense strand is 36 nucleotides with positions numbered 1-36 from 5′ to 3′, wherein the stem-loop comprises nucleotides at positions 21-36, and wherein one or more nucleosides at positions 27-30 are represented by formula II-Ib. In some embodiments, the antisense strand is 22 nucleotides.

[0794] In some aspects, the disclosure provides oligonucleotide-ligand conjugates for targeting a target mRNA (e.g., a target mRNA regulating immune suppression) and inhibiting or reducing target gene expression (e.g., via the RNAi pathway), wherein the oligonucleotide-ligand conjugate is a double-stranded (ds) nucleic acid molecule comprising a sense strand (also referred to herein as a passenger strand) and an antisense strand (also referred to herein as a guide strand). In some embodiments, the sense strand and antisense strand are separate strands and are not covalently linked. In some embodiments, the sense strand and antisense strand are covalently linked. In some embodiments, the sense strand and antisense strand form a duplex region, wherein the sense strand and antisense strand, or a portion thereof, binds or anneals to one another in a complementary manner (e.g., by Watson-Crick base pairing).

[0795] In some embodiments, an oligonucleotide-ligand conjugate comprises an antisense strand of 15 to 30 nucleotides and a sense strand of 15 to 40 nucleotide, wherein the sense and antisense strands form a duplex region, wherein the antisense strand comprises a region of complementarity to a target sequence expressed in the adrenal gland or adrenal cortex, and wherein the 5′ terminal nucleotide of the sense strand comprises a nucleoside represented by formula II-Ib:

[chemical structure]

wherein B is selected from an adenine and a guanine nucleobase, and wherein R⁵ is a hydrocarbon chain. In some embodiments, m is 1, X1 is O, Y2 is an internucleotide linking group attaching to the 5′ terminal of a nucleoside,

[0796] Y is represented by

[chemical structure]

Y1 is a linking group attaching to the 2′ or 3′ terminal of a nucleotide, X2 is O, X3 is O, and R3 is H. In some embodiments, the hydrocarbon chain is a C8-C30 hydrocarbon chain. In some embodiments, the hydrocarbon chain is a C22 hydrocarbon chain. In some embodiments, the C22 hydrocarbon chain is represented by

[chemical structure]

[0797] In some embodiments, the sense and antisense strands of an oligonucleotide comprise nucleotides sequences selected from the group consisting of:
[0798] (a) SEQ ID NOs: 483 and 724, respectively;
[0799] (b) SEQ ID NOs: 484 and 725, respectively;
[0800] (c) SEQ ID NOs: 486 and 727, respectively;
[0801] (d) SEQ ID NOs: 487 and 728, respectively;
[0802] (e) SEQ ID NOs: 488 and 729, respectively;
[0803] (f) SEQ ID NOs: 489 and 730, respectively;
[0804] (g) SEQ ID NOs: 490 and 731, respectively;
[0805] (h) SEQ ID NOs: 492 and 733, respectively;
[0806] (i) SEQ ID NOs: 493 and 734, respectively;
[0807] (j) SEQ ID NOs: 494 and 735, respectively;
[0808] (k) SEQ ID NOs: 495 and 736, respectively;
[0809] (l) SEQ ID NOs: 496 and 737, respectively;
[0810] (m) SEQ ID NOs: 497 and 738, respectively;
[0811] (n) SEQ ID NOs: 498 and 739, respectively;
[0812] (o) SEQ ID NOs: 499 and 740, respectively;
[0813] (p) SEQ ID NOs: 500 and 741, respectively;
[0814] (q) SEQ ID NOs: 501 and 742, respectively;
[0815] (r) SEQ ID NOs: 502 and 743, respectively;
[0816] (s) SEQ ID NOs: 503 and 744, respectively;
[0817] (t) SEQ ID NOs: 504 and 745, respectively;
[0818] (u) SEQ ID NOs: 505 and 746, respectively;
[0819] (v) SEQ ID NOs: 506 and 747, respectively;
[0820] (w) SEQ ID NOs: 507 and 748, respectively;
[0821] (x) SEQ ID NOs: 508 and 749, respectively;
[0822] (y) SEQ ID NOs: 509 and 750, respectively;
[0823] (z) SEQ ID NOs: 510 and 751, respectively;
[0824] (aa) SEQ ID NOs: 511 and 752, respectively;
[0825] (bb) SEQ ID NOs: 512 and 753, respectively;
[0826] (cc) SEQ ID NOs: 513 and 754, respectively;
[0827] (dd) SEQ ID NOs: 514 and 755, respectively;
[0828] (ee) SEQ ID NOs: 515 and 756, respectively;
[0829] (ff) SEQ ID NOs: 516 and 757, respectively;
[0830] (gg) SEQ ID NOs: 517 and 758, respectively;
[0831] (hh) SEQ ID NOs: 518 and 758, respectively; and,
[0832] (ii) SEQ ID NOs: 491 and 732, respectively,
   wherein the oligonucleotide comprises at least one lipid moiety conjugated to a nucleotide.

[0833] In some embodiments, the sense and antisense strands of an oligonucleotide comprise nucleotides sequences selected from the group consisting of:
[0834] (a) SEQ ID NOs: 484 and 725, respectively;
[0835] (b) SEQ ID NOs: 486 and 727, respectively;
[0836] (c) SEQ ID NOs: 487 and 728, respectively;
[0837] (d) SEQ ID NOs: 488 and 729, respectively;
[0838] (e) SEQ ID NOs: 489 and 730, respectively;
[0839] (f) SEQ ID NOs: 491 and 732, respectively; and,
[0840] (g) SEQ ID NOs: 502 and 743, respectively,
   wherein the oligonucleotide comprises at least one lipid moiety conjugated to a nucleotide.

[0841] In some embodiments, the sense and antisense strands of an oligonucleotide comprise nucleotides sequences selected from the group consisting of:
[0842] (a) SEQ ID NOs: 484 and 725, respectively;
[0843] (b) SEQ ID NOs: 487 and 728, respectively; and,
[0844] (c) SEQ ID NOs: 491 and 732, respectively,
   wherein the oligonucleotide comprises at least one lipid moiety conjugated to a nucleotide.

[0845] In some embodiments, the sense and antisense strands of an oligonucleotide comprise nucleotides sequences selected from the group consisting of:
[0846] (a) SEQ ID NOs: 483 and 724, respectively;
[0847] (b) SEQ ID NOs: 484 and 725, respectively;
[0848] (c) SEQ ID NOs: 486 and 727, respectively;
[0849] (d) SEQ ID NOs: 487 and 728, respectively;
[0850] (e) SEQ ID NOs: 488 and 729, respectively;
[0851] (f) SEQ ID NOs: 489 and 730, respectively;
[0852] (g) SEQ ID NOs: 490 and 731, respectively;
[0853] (h) SEQ ID NOs: 492 and 733, respectively;
[0854] (i) SEQ ID NOs: 493 and 734, respectively;
[0855] (j) SEQ ID NOs: 494 and 735, respectively;
[0856] (k) SEQ ID NOs: 495 and 736, respectively;
[0857] (l) SEQ ID NOs: 496 and 737, respectively;
[0858] (m) SEQ ID NOs: 497 and 738, respectively;
[0859] (n) SEQ ID NOs: 498 and 739, respectively;
[0860] (o) SEQ ID NOs: 499 and 740, respectively;
[0861] (p) SEQ ID NOs: 500 and 741, respectively;
[0862] (q) SEQ ID NOs: 501 and 742, respectively;
[0863] (r) SEQ ID NOs: 502 and 743, respectively;
[0864] (s) SEQ ID NOs: 503 and 744, respectively;
[0865] (t) SEQ ID NOs: 504 and 745, respectively;
[0866] (u) SEQ ID NOs: 505 and 746, respectively;
[0867] (v) SEQ ID NOs: 506 and 747, respectively;
[0868] (w) SEQ ID NOs: 507 and 748, respectively;
[0869] (x) SEQ ID NOs: 508 and 749, respectively;
[0870] (y) SEQ ID NOs: 509 and 750, respectively;
[0871] (z) SEQ ID NOs: 510 and 751, respectively;
[0872] (aa) SEQ ID NOs: 511 and 752, respectively;
[0873] (bb) SEQ ID NOs: 512 and 753, respectively;
[0874] (cc) SEQ ID NOs: 513 and 754, respectively;
[0875] (dd) SEQ ID NOs: 514 and 755, respectively;
[0876] (ee) SEQ ID NOs: 515 and 756, respectively;
[0877] (ff) SEQ ID NOs: 516 and 757, respectively;
[0878] (gg) SEQ ID NOs: 517 and 758, respectively;
[0879] (hh) SEQ ID NOs: 518 and 758, respectively; and,
[0880] (ii) SEQ ID NOs: 491 and 732, respectively,
   wherein the oligonucleotide comprises at least one hydrocarbon chain conjugated to a nucleotide.

[0881] In some embodiments, the sense and antisense strands of an oligonucleotide comprise nucleotides sequences selected from the group consisting of:
[0882] (a) SEQ ID NOs: 484 and 725, respectively;
[0883] (b) SEQ ID NOs: 486 and 727, respectively;
[0884] (c) SEQ ID NOs: 487 and 728, respectively;
[0885] (d) SEQ ID NOs: 488 and 729, respectively;
[0886] (e) SEQ ID NOs: 489 and 730, respectively;
[0887] (f) SEQ ID NOs: 491 and 732, respectively; and,
[0888] (g) SEQ ID NOs: 502 and 743, respectively,
   wherein the oligonucleotide comprises at least one hydrocarbon conjugated to a nucleotide.

[0889] In some embodiments, the sense and antisense strands of an oligonucleotide comprise nucleotides sequences selected from the group consisting of:
[0890] (a) SEQ ID NOs: 484 and 725, respectively;
[0891] (b) SEQ ID NOs: 487 and 728, respectively; and,
[0892] (c) SEQ ID NOs: 491 and 732, respectively,
   wherein the oligonucleotide comprises at least on hydrocarbon conjugated to a nucleotide.

[0893] In some embodiments, the sense and antisense strands of an oligonucleotide comprise nucleotides sequences selected from the group consisting of:
[0894] (a) SEQ ID NOs: 483 and 724, respectively;
[0895] (b) SEQ ID NOs: 484 and 725, respectively;
[0896] (c) SEQ ID NOs: 486 and 727, respectively;
[0897] (d) SEQ ID NOs: 487 and 728, respectively;
[0898] (e) SEQ ID NOs: 488 and 729, respectively;
[0899] (f) SEQ ID NOs: 489 and 730, respectively;
[0900] (g) SEQ ID NOs: 490 and 731, respectively;
[0901] (h) SEQ ID NOs: 492 and 733, respectively;
[0902] (i) SEQ ID NOs: 493 and 734, respectively;
[0903] (j) SEQ ID NOs: 494 and 735, respectively;
[0904] (k) SEQ ID NOs: 495 and 736, respectively;
[0905] (l) SEQ ID NOs: 496 and 737, respectively;
[0906] (m) SEQ ID NOs: 497 and 738, respectively;
[0907] (n) SEQ ID NOs: 498 and 739, respectively;
[0908] (o) SEQ ID NOs: 499 and 740, respectively;
[0909] (p) SEQ ID NOs: 500 and 741, respectively;
[0910] (q) SEQ ID NOs: 501 and 742, respectively;
[0911] (r) SEQ ID NOs: 502 and 743, respectively;
[0912] (s) SEQ ID NOs: 503 and 744, respectively;
[0913] (t) SEQ ID NOs: 504 and 745, respectively;
[0914] (u) SEQ ID NOs: 505 and 746, respectively;
[0915] (v) SEQ ID NOs: 506 and 747, respectively;
[0916] (w) SEQ ID NOs: 507 and 748, respectively;
[0917] (x) SEQ ID NOs: 508 and 749, respectively;
[0918] (y) SEQ ID NOs: 509 and 750, respectively;
[0919] (z) SEQ ID NOs: 510 and 751, respectively;
[0920] (aa) SEQ ID NOs: 511 and 752, respectively;
[0921] (bb) SEQ ID NOs: 512 and 753, respectively;
[0922] (cc) SEQ ID NOs: 513 and 754, respectively;
[0923] (dd) SEQ ID NOs: 514 and 755, respectively;
[0924] (ee) SEQ ID NOs: 515 and 756, respectively;
[0925] (ff) SEQ ID NOs: 516 and 757, respectively;
[0926] (gg) SEQ ID NOs: 517 and 758, respectively;
[0927] (hh) SEQ ID NOs: 518 and 758, respectively; and,
[0928] (ii) SEQ ID NOs: 491 and 732, respectively,
   wherein the oligonucleotide comprises at least one C18 hydrocarbon chain conjugated to a nucleotide.

[0929] In some embodiments, the sense and antisense strands of an oligonucleotide comprise nucleotides sequences selected from the group consisting of:
[0930] (a) SEQ ID NOs: 484 and 725, respectively;
[0931] (b) SEQ ID NOs: 486 and 727, respectively;
[0932] (c) SEQ ID NOs: 487 and 728, respectively;
[0933] (d) SEQ ID NOs: 488 and 729, respectively;
[0934] (e) SEQ ID NOs: 489 and 730, respectively;
[0935] (f) SEQ ID NOs: 491 and 732, respectively; and,
[0936] (g) SEQ ID NOs: 502 and 743, respectively,
   wherein the oligonucleotide comprises at least one C18 hydrocarbon conjugated to a nucleotide.

[0937] In some embodiments, the sense and antisense strands of an oligonucleotide comprise nucleotides sequences selected from the group consisting of:
[0938] (a) SEQ ID NOs: 484 and 725, respectively;
[0939] (b) SEQ ID NOs: 487 and 728, respectively; and,
[0940] (c) SEQ ID NOs: 491 and 732, respectively,
   wherein the oligonucleotide comprises at least one C18 hydrocarbon conjugated to a nucleotide.

[0941] In some embodiments, the sense and antisense strands of an oligonucleotide comprise nucleotides sequences selected from the group consisting of:
[0942] (a) SEQ ID NOs: 483 and 724, respectively;
[0943] (b) SEQ ID NOs: 484 and 725, respectively;
[0944] (c) SEQ ID NOs: 486 and 727, respectively;
[0945] (d) SEQ ID NOs: 487 and 728, respectively;
[0946] (e) SEQ ID NOs: 488 and 729, respectively;
[0947] (f) SEQ ID NOs: 489 and 730, respectively;
[0948] (g) SEQ ID NOs: 490 and 731, respectively;
[0949] (h) SEQ ID NOs: 492 and 733, respectively;
[0950] (i) SEQ ID NOs: 493 and 734, respectively;
[0951] (j) SEQ ID NOs: 494 and 735, respectively;
[0952] (k) SEQ ID NOs: 495 and 736, respectively;
[0953] (l) SEQ ID NOs: 496 and 737, respectively;
[0954] (m) SEQ ID NOs: 497 and 738, respectively;
[0955] (n) SEQ ID NOs: 498 and 739, respectively;
[0956] (o) SEQ ID NOs: 499 and 740, respectively;
[0957] (p) SEQ ID NOs: 500 and 741, respectively;
[0958] (q) SEQ ID NOs: 501 and 742, respectively;
[0959] (r) SEQ ID NOs: 502 and 743, respectively;
[0960] (s) SEQ ID NOs: 503 and 744, respectively;
[0961] (t) SEQ ID NOs: 504 and 745, respectively;
[0962] (u) SEQ ID NOs: 505 and 746, respectively;
[0963] (v) SEQ ID NOs: 506 and 747, respectively;
[0964] (w) SEQ ID NOs: 507 and 748, respectively;
[0965] (x) SEQ ID NOs: 508 and 749, respectively;
[0966] (y) SEQ ID NOs: 509 and 750, respectively;
[0967] (z) SEQ ID NOs: 510 and 751, respectively;
[0968] (aa) SEQ ID NOs: 511 and 752, respectively;
[0969] (bb) SEQ ID NOs: 512 and 753, respectively;
[0970] (cc) SEQ ID NOs: 513 and 754, respectively;
[0971] (dd) SEQ ID NOs: 514 and 755, respectively;
[0972] (ee) SEQ ID NOs: 515 and 756, respectively;
[0973] (ff) SEQ ID NOs: 516 and 757, respectively;
[0974] (gg) SEQ ID NOs: 517 and 758, respectively;
[0975] (hh) SEQ ID NOs: 518 and 758, respectively; and,
[0976] (ii) SEQ ID NOs: 491 and 732, respectively,
   wherein the oligonucleotide comprises at least one C22 hydrocarbon chain conjugated to a nucleotide.

[0977] In some embodiments, the sense and antisense strands of an oligonucleotide comprise nucleotides sequences selected from the group consisting of:

[0978] (a) SEQ ID NOs: 484 and 725, respectively;
[0979] (b) SEQ ID NOs: 486 and 727, respectively;
[0980] (c) SEQ ID NOs: 487 and 728, respectively;
[0981] (d) SEQ ID NOs: 488 and 729, respectively;
[0982] (e) SEQ ID NOs: 489 and 730, respectively;
[0983] (f) SEQ ID NOs: 491 and 732, respectively; and,
[0984] (g) SEQ ID NOs: 502 and 743, respectively,
   wherein the oligonucleotide comprises at least one C22 hydrocarbon conjugated to a nucleotide.

### Exemplary Oligonucleotides for Reducing CD274 Expression

[0985] In some embodiments, the CD274-targeting oligonucleotide (e.g., an RNAi oligonucleotide) for reducing CD274 expression provided by the disclosure comprise a sense strand and an antisense strand, wherein all nucleotides comprising the sense strand and antisense strand are modified, wherein the antisense strand comprises a region of complementarity to a CD274 mRNA target sequence of any one of SEQ ID NOs: 1-2 and 4-241 and wherein the region of complementarity is at least 15 contiguous nucleotides in length. In some embodiments, the 5′-terminal nucleotide of the antisense strand comprises 4′-O-monomethylphosphonate-2′-O-methyluridine [MePhosphonate-4O-mU], as described herein. In some embodiments, the 5′-terminal nucleotide of the antisense strand comprises a phosphorothioate linkage. In some embodiments, the antisense strand and the sense strand comprise one or more 2′-fluoro (2′-F) and 2′-O-methyl (2′-OMe) modified nucleotides and at least one phosphorothioate linkage. In some embodiments, the antisense strand comprises four (4) phosphorothioate linkages and the sense strand comprises one (1) phosphorothioate linkage. In some embodiments, the antisense strand comprises five (5) phosphorothioate linkages and the sense strand comprises one (1) phosphorothioate linkage.

[0986] In some embodiments, an oligonucleotide provided herein (e.g., an RNAi oligonucleotide) comprises a sense strand having a sequence of any one of SEQ ID NOs: 483-484 and 486-723 and an antisense strand comprising a complementary sequence selected from SEQ ID NOs: 724-725 and 727-964.

[0987] In some embodiments, an oligonucleotide provided herein (e.g., an RNAi oligonucleotide) comprises a sense strand having a sequence of any one of SEQ ID NOs: 965-1000 and an antisense strand comprising a complementary sequence selected from SEQ ID NOs: 1001-1036.

[0988] In some embodiments, an oligonucleotide provided herein (e.g., and RNAi oligonucleotide) for reducing CD274 expression comprises:
[0989] a sense strand comprising a 2′-F modified nucleotide at positions 8-11, a 2′-OMe modified nucleotide at positions 1-7, 12-27, and 31-36, a GalNAc-conjugated nucleotide at position 28, 29 and 30; and a phosphorothioate linkage between positions 1 and 2;
[0990] an antisense strand comprising a 2′-F modified nucleotide at positions 2, 3, 4, 5, 7, 10 and 14, a 2′-OMe at positions 1, 6, 8, 9, 11-13, and 15-22, a phosphorothioate linkage between positions 1 and 2, positions 2 and 3, positions 3 and 4, positions 20 and 21, and positions 21 and 22, and a 5′-terminal nucleotide at position 1 comprising a 4′-phosphate analog, optionally wherein the 5′-terminal nucleotide comprises 4′-O-monomethylphosphonate-2′-O-methyluridine [MePhosphonate-4O-mU]; wherein positions 1-20 of the antisense strand form a duplex region with positions 1-20 of the sense strand, wherein positions 21-36 of the sense strand form a stem-loop, wherein positions 27-30 form the loop of the stem-loop, optionally wherein positions 27-30 comprise a tetraloop, wherein positions 21 and 22 of the antisense strand comprise an overhang, and wherein the sense strand and antisense strands comprise nucleotide sequences selected from the group consisting of:
[0991] (a) SEQ ID NOs: 483 and 724, respectively;
[0992] (b) SEQ ID NOs: 484 and 725, respectively;
[0993] (c) SEQ ID NOs: 486 and 727, respectively;
[0994] (d) SEQ ID NOs: 487 and 728, respectively;
[0995] (e) SEQ ID NOs: 488 and 729, respectively;
[0996] (f) SEQ ID NOs: 489 and 730, respectively;
[0997] (g) SEQ ID NOs: 490 and 731, respectively;
[0998] (h) SEQ ID NOs: 492 and 733, respectively;
[0999] (i) SEQ ID NOs: 493 and 734, respectively;
[1000] (j) SEQ ID NOs: 494 and 735, respectively;
[1001] (k) SEQ ID NOs: 495 and 736, respectively;
[1002] (l) SEQ ID NOs: 496 and 737, respectively;
[1003] (m) SEQ ID NOs: 497 and 738, respectively;
[1004] (n) SEQ ID NOs: 498 and 739, respectively;
[1005] (o) SEQ ID NOs: 499 and 740, respectively;
[1006] (p) SEQ ID NOs: 500 and 741, respectively;
[1007] (q) SEQ ID NOs: 501 and 742, respectively;
[1008] (r) SEQ ID NOs: 502 and 743, respectively;
[1009] (s) SEQ ID NOs: 503 and 744, respectively;
[1010] (t) SEQ ID NOs: 504 and 745, respectively;
[1011] (u) SEQ ID NOs: 505 and 746, respectively;
[1012] (v) SEQ ID NOs: 506 and 747, respectively;
[1013] (w) SEQ ID NOs: 507 and 748, respectively;
[1014] (x) SEQ ID NOs: 508 and 749, respectively;
[1015] (y) SEQ ID NOs: 509 and 750, respectively;
[1016] (z) SEQ ID NOs: 510 and 751, respectively;
[1017] (aa) SEQ ID NOs: 511 and 752, respectively;
[1018] (bb) SEQ ID NOs: 512 and 753, respectively;
[1019] (cc) SEQ ID NOs: 513 and 754, respectively;
[1020] (dd) SEQ ID NOs: 514 and 755, respectively;
[1021] (ee) SEQ ID NOs: 515 and 756, respectively;
[1022] (ff) SEQ ID NOs: 516 and 757, respectively;
[1023] (gg) SEQ ID NOs: 517 and 758, respectively;
[1024] (hh) SEQ ID NOs: 518 and 758, respectively; and,
[1025] (ii) SEQ ID NOs: 491 and 732, respectively.

[1026] In some embodiments, the CD274-targeting oligonucleotide (e.g., an RNAi oligonucleotide) for reducing CD274 expression comprise:
[1027] a sense strand comprising a 2′-F modified nucleotide at positions 8-11, a 2′-OMe modified nucleotide at positions 1-7, 12-27, and 31-36, a GalNAc-conjugated nucleotide at position 28, 29 and 30; and a phosphorothioate linkage between positions 1 and 2;
[1028] an antisense strand comprising a 2′-F modified nucleotide at positions 2, 3, 4, 5, 7, 10 and 14, a 2′-OMe at positions 1, 6, 8, 9, 11-13, and 15-22, a phosphorothioate linkage between positions 1 and 2, positions 2 and 3, positions 3 and 4, positions 20 and 21, and positions 21 and 22, and a 5′-terminal nucleotide at position 1 comprising a 4′-phosphate analog, optionally wherein the 5′-terminal nucleotide comprises 4′-O-monomethylphosphonate-2′-O-methyluridine [MePhosphonate-4O-mU]; wherein positions 1-20 of the antisense strand form a duplex region with positions 1-20 of the sense strand, wherein positions 21-36 of the sense strand form a stem-loop, wherein positions 27-30 form the loop of the stem-loop, optionally wherein positions 27-30 comprise a tetraloop, wherein positions 21 and 22 of the antisense strand comprise an overhang, and wherein the sense strand and antisense strands comprise nucleotide sequences selected from the group consisting of:
[1029] (a) SEQ ID NOs: 484 and 725, respectively;
[1030] (b) SEQ ID NOs: 486 and 727, respectively;
[1031] (c) SEQ ID NOs: 487 and 728, respectively;
[1032] (d) SEQ ID NOs: 488 and 729, respectively;
[1033] (e) SEQ ID NOs: 489 and 730, respectively;
[1034] (f) SEQ ID NOs: 491 and 732, respectively; and,
[1035] (g) SEQ ID NOs: 502 and 743, respectively.

[1036] In some embodiments, a CD274-targeting oligonucleotide for reducing CD274 expression provided by the disclosure comprises a sense strand comprising the nucleotide sequence as set forth in SEQ ID NO: 484 and an antisense strand comprising the nucleotide sequence as set forth in SEQ ID NO: 725. In some embodiments, a CD274-targeting oligonucleotide for reducing CD274 expression provided by the disclosure comprises a sense strand comprising the nucleotide sequence as set forth in SEQ ID NO: 486 and an antisense strand comprising the nucleotide sequence as set forth in SEQ ID NO: 727. In some embodiments, a CD274-targeting oligonucleotide for reducing CD274 expression provided by the disclosure comprises a sense strand comprising the nucleotide sequence as set forth in SEQ ID NO: 487 and an antisense strand comprising the nucleotide sequence as set forth in SEQ ID NO: 728. In some embodiments, a CD274-targeting oligonucleotide for reducing CD274 expression provided by the disclosure comprises a sense strand comprising the nucleotide sequence as set forth in SEQ ID NO: 488 and an antisense strand comprising the nucleotide sequence as set forth in SEQ ID NO: 729. In some embodiments, a CD274-targeting oligonucleotide for reducing CD274 expression provided by the disclosure comprises a sense strand comprising the nucleotide sequence as set forth in SEQ ID NO: 489 and an antisense strand comprising the nucleotide sequence as set forth in SEQ ID NO: 730. In some embodiments, a CD274-targeting oligonucleotide for reducing CD274 expression provided by the disclosure comprises a sense strand comprising the nucleotide sequence as set forth in SEQ ID NO: 491 and an antisense strand comprising the nucleotide sequence as set forth in SEQ ID NO: 732. In some embodiments, a CD274-targeting oligonucleotide for reducing CD274 expression provided by the disclosure comprises a sense strand comprising the nucleotide sequence as set forth in SEQ ID NO: 502 and an antisense strand comprising the nucleotide sequence as set forth in SEQ ID NO: 743.

[1037] In some embodiments, a CD274-targeting oligonucleotide (e.g., an RNAi oligonucleotide) for reducing CD274 expression comprises (i) an antisense strand of 19-30 nucleotides in length, wherein the antisense strand comprises a nucleotide sequence comprising a region of complementarity to a CD274 mRNA target sequence, wherein the region of complementarity is set forth in SEQ ID NO: 243; and (ii) a sense strand of 19-50 nucleotides in length comprising a region of complementarity to the antisense strand, wherein the antisense and sense strands are separate strands which form an asymmetric duplex region having an overhang of 1-4 nucleotides at the 3′ terminus of the antisense strand.

[1038] In some embodiments, a CD274-targeting oligonucleotide (e.g., an RNAi oligonucleotide) for reducing CD274 expression comprises (i) an antisense strand of 19-30 nucleotides in length, wherein the antisense strand comprises a nucleotide sequence comprising a region of complementarity to a CD274 mRNA target sequence, wherein the region of complementarity is set forth in SEQ ID NO: 245; and (ii) a sense strand of 19-50 nucleotides in length comprising a region of complementarity to the antisense strand, wherein the antisense and sense strands are separate strands which form an asymmetric duplex region having an overhang of 1-4 nucleotides at the 3′ terminus of the antisense strand.

[1039] In some embodiments, a CD274-targeting oligonucleotide (e.g., an RNAi oligonucleotide) for reducing CD274 expression comprises (i) an antisense strand of 19-30 nucleotides in length, wherein the antisense strand comprises a nucleotide sequence comprising a region of complementarity to a CD274 mRNA target sequence, wherein the region of complementarity is set forth in SEQ ID NO: 246; and (ii) a sense strand of 19-50 nucleotides in length comprising a region of complementarity to the antisense strand, wherein the antisense and sense strands are separate strands which form an asymmetric duplex region having an overhang of 1-4 nucleotides at the 3′ terminus of the antisense strand.

[1040] In some embodiments, a CD274-targeting oligonucleotide (e.g., an RNAi oligonucleotide) for reducing CD274 expression comprises (i) an antisense strand of 19-30 nucleotides in length, wherein the antisense strand comprises a nucleotide sequence comprising a region of complementarity to a CD274 mRNA target sequence, wherein the region of complementarity is set forth in SEQ ID NO: 247; and (ii) a sense strand of 19-50 nucleotides in length comprising a region of complementarity to the antisense strand, wherein the antisense and sense strands are separate strands which form an asymmetric duplex region having an overhang of 1-4 nucleotides at the 3′ terminus of the antisense strand.

[1041] In some embodiments, a CD274-targeting oligonucleotide (e.g., an RNAi oligonucleotide) for reducing CD274 expression comprises (i) an antisense strand of 19-30 nucleotides in length, wherein the antisense strand comprises a nucleotide sequence comprising a region of complementarity to a CD274 mRNA target sequence, wherein the region of complementarity is set forth in SEQ ID NO: 248; and (ii) a sense strand of 19-50 nucleotides in length comprising a region of complementarity to the antisense strand, wherein the antisense and sense strands are separate strands which form an asymmetric duplex region having an overhang of 1-4 nucleotides at the 3′ terminus of the antisense strand.

[1042] In some embodiments, a CD274-targeting oligonucleotide (e.g., an RNAi oligonucleotide) for reducing CD274 expression comprises (i) an antisense strand of 19-30 nucleotides in length, wherein the antisense strand comprises a nucleotide sequence comprising a region of complementarity to a CD274 mRNA target sequence, wherein the region of complementarity is set forth in SEQ ID NO: 250; and (ii) a sense strand of 19-50 nucleotides in length comprising a region of complementarity to the antisense strand, wherein the antisense and sense strands are separate strands which form an asymmetric duplex region having an overhang of 1-4 nucleotides at the 3′ terminus of the antisense strand.

[1043] In some embodiments, a CD274-targeting oligonucleotide (e.g., an RNAi oligonucleotide) for reducing CD274 expression comprises (i) an antisense strand of 19-30 nucleotides in length, wherein the antisense strand comprises a nucleotide sequence comprising a region of complementarity to a CD274 mRNA target sequence, wherein the region of complementarity is set forth in SEQ ID NO: 261; and (ii) a sense strand of 19-50 nucleotides in length comprising a region of complementarity to the antisense strand, wherein the antisense and sense strands are separate strands which form an asymmetric duplex region having an overhang of 1-4 nucleotides at the 3′ terminus of the antisense strand.

[1044] In some embodiments, a CD274-targeting oligonucleotide (e.g., an RNAi oligonucleotide) for reducing CD274 expression comprises (i) an antisense strand of 19-30 nucleotides in length, wherein the antisense strand comprises a nucleotide sequence comprising a region of complementarity to a CD274 mRNA target sequence, wherein the region of complementarity is set forth in SEQ ID NO: 243; and (ii) a sense strand of 19-50 nucleotides in length comprising a region of complementarity to the antisense strand and a stem-loop at the 3′terminus, wherein the stem-loop is set forth as S1-L-S2, wherein S1 is complementary to S2 and wherein L forms a loop between S1 and S2 of 3 to 5 nucleotides in length, wherein the antisense and sense strands are separate strands which form an asymmetric duplex region having an overhang of 1-4 nucleotides at the 3′ terminus of the antisense strand.

[1045] In some embodiments, a CD274-targeting oligonucleotide (e.g., an RNAi oligonucleotide) for reducing CD274 expression comprises (i) an antisense strand of 19-30 nucleotides in length, wherein the antisense strand comprises a nucleotide sequence comprising a region of complementarity to a CD274 mRNA target sequence, wherein the region of complementarity is set forth in SEQ ID NO: 245; and (ii) a sense strand of 19-50 nucleotides in length comprising a region of complementarity to the antisense strand and a stem-loop at the 3′terminus, wherein the stem-loop is set forth as S1-L-S2, wherein S1 is complementary to S2 and wherein L forms a loop between S1 and S2 of 3 to 5 nucleotides in length, wherein the antisense and sense strands are separate strands which form an asymmetric duplex region having an overhang of 1-4 nucleotides at the 3′ terminus of the antisense strand.

[1046] In some embodiments, a CD274-targeting oligonucleotide (e.g., an RNAi oligonucleotide) for reducing CD274 expression comprises (i) an antisense strand of 19-30 nucleotides in length, wherein the antisense strand comprises a nucleotide sequence comprising a region of complementarity to a CD274 mRNA target sequence, wherein the region of complementarity is set forth in SEQ ID NO: 246; and (ii) a sense strand of 19-50 nucleotides in length comprising a region of complementarity to the antisense strand and a stem-loop at the 3′terminus, wherein the stem-loop is set forth as S1-L-S2, wherein S1 is complementary to S2 and wherein L forms a loop between S1 and S2 of 3 to 5 nucleotides in length, wherein the antisense and sense strands are separate strands which form an asymmetric duplex region having an overhang of 1-4 nucleotides at the 3′ terminus of the antisense strand.

[1047] In some embodiments, a CD274-targeting oligonucleotide (e.g., an RNAi oligonucleotide) for reducing CD274 expression comprises (i) an antisense strand of 19-30 nucleotides in length, wherein the antisense strand comprises a nucleotide sequence comprising a region of complementarity to a CD274 mRNA target sequence, wherein the region of complementarity is set forth in SEQ ID NO: 247; and (ii) a sense strand of 19-50 nucleotides in length comprising a region of complementarity to the antisense strand and a stem-loop at the 3′terminus, wherein the stem-loop is set forth as S1-L-S2, wherein S1 is complementary to S2 and wherein L forms a loop between S1 and S2 of 3 to 5 nucleotides in length, wherein the antisense and sense strands are separate strands which form an asymmetric duplex region having an overhang of 1-4 nucleotides at the 3′ terminus of the antisense strand.

[1048] In some embodiments, a CD274-targeting oligonucleotide (e.g., an RNAi oligonucleotide) for reducing CD274 expression comprises (i) an antisense strand of 19-30 nucleotides in length, wherein the antisense strand comprises a nucleotide sequence comprising a region of complementarity to a CD274 mRNA target sequence, wherein the region of complementarity is set forth in SEQ ID NO: 248; and (ii) a sense strand of 19-50 nucleotides in length comprising a region of complementarity to the antisense strand and a stem-loop at the 3′terminus, wherein the stem-loop is set forth as S1-L-S2, wherein S1 is complementary to S2 and wherein L forms a loop between S1 and S2 of 3 to 5 nucleotides in length, wherein the antisense and sense strands are separate strands which form an asymmetric duplex region having an overhang of 1-4 nucleotides at the 3′ terminus of the antisense strand.

[1049] In some embodiments, a CD274-targeting oligonucleotide (e.g., an RNAi oligonucleotide) for reducing CD274 expression comprises (i) an antisense strand of 19-30 nucleotides in length, wherein the antisense strand comprises a nucleotide sequence comprising a region of complementarity to a CD274 mRNA target sequence, wherein the region of complementarity is set forth in SEQ ID NO: 250; and (ii) a sense strand of 19-50 nucleotides in length comprising a region of complementarity to the antisense strand and a stem-loop at the 3′terminus, wherein the stem-loop is set forth as S1-L-S2, wherein S1 is complementary to S2 and wherein L forms a loop between S1 and S2 of 3 to 5 nucleotides in length, wherein the antisense and sense strands are separate strands which form an asymmetric duplex region having an overhang of 1-4 nucleotides at the 3′ terminus of the antisense strand.

[1050] In some embodiments, a CD274-targeting oligonucleotide (e.g., an RNAi oligonucleotide) for reducing CD274 expression comprises (i) an antisense strand of 19-30 nucleotides in length, wherein the antisense strand comprises a nucleotide sequence comprising a region of complementarity to a CD274 mRNA target sequence, wherein the region of complementarity is set forth in SEQ ID NO: 261; and (ii) a sense strand of 19-50 nucleotides in length comprising a region of complementarity to the antisense strand and a stem-loop at the 3′terminus, wherein the stem-loop is set forth as S1-L-S2, wherein S1 is complementary to S2 and wherein L forms a loop between S1 and S2 of 3 to 5 nucleotides in length, wherein the antisense and sense strands are separate strands which form an asymmetric duplex region having an overhang of 1-4 nucleotides at the 3′ terminus of the antisense strand.

[1051] In some embodiments, a CD274-targeting oligonucleotide (e.g., an RNAi oligonucleotide) for reducing CD274 expression comprises (i) an antisense strand of 19-30 nucleotides in length, wherein the antisense strand comprises a nucleotide sequence comprising a region of complementarity to a CD274 mRNA target sequence, wherein the region of complementarity is set forth in SEQ ID NO: 243; and (ii) a sense strand of 19-50 nucleotides in length comprising a region of complementarity to the antisense strand, wherein the region of complementarity to the antisense strand is set forth in SEQ ID NO: 2, wherein the antisense and sense strands are separate strands which form an asymmetric duplex region having an overhang of 1-4 nucleotides at the 3′ terminus of the antisense strand.

[1052] In some embodiments, a CD274-targeting oligonucleotide (e.g., an RNAi oligonucleotide) for reducing CD274 expression comprises (i) an antisense strand of 19-30 nucleotides in length, wherein the antisense strand comprises a nucleotide sequence comprising a region of complementarity to a CD274 mRNA target sequence, wherein the region of complementarity is set forth in SEQ ID NO: 245; and (ii) a sense strand of 19-50 nucleotides in length comprising a region of complementarity to the antisense strand, wherein the region of complementarity to the antisense strand is set forth in SEQ ID NO: 4, wherein the antisense and sense strands are separate strands which form an asymmetric duplex region having an overhang of 1-4 nucleotides at the 3′ terminus of the antisense strand.

[1053] In some embodiments, a CD274-targeting oligonucleotide (e.g., an RNAi oligonucleotide) for reducing CD274 expression comprises (i) an antisense strand of 19-30 nucleotides in length, wherein the antisense strand comprises a nucleotide sequence comprising a region of complementarity to a CD274 mRNA target sequence, wherein the region of complementarity is set forth in SEQ ID NO: 246; and (ii) a sense strand of 19-50 nucleotides in length comprising a region of complementarity to the antisense strand, wherein the region of complementarity to the antisense strand is set forth in SEQ ID NO: 5, wherein the antisense and sense strands are separate strands which form an asymmetric duplex region having an overhang of 1-4 nucleotides at the 3′ terminus of the antisense strand.

[1054] In some embodiments, a CD274-targeting oligonucleotide (e.g., an RNAi oligonucleotide) for reducing CD274 expression comprises (i) an antisense strand of 19-30 nucleotides in length, wherein the antisense strand comprises a nucleotide sequence comprising a region of complementarity to a CD274 mRNA target sequence, wherein the region of complementarity is set forth in SEQ ID NO: 247; and (ii) a sense strand of 19-50 nucleotides in length comprising a region of complementarity to the antisense strand, wherein the region of complementarity to the antisense strand is set forth in SEQ ID NO:6, wherein the antisense and sense strands are separate strands which form an asymmetric duplex region having an overhang of 1-4 nucleotides at the 3′ terminus of the antisense strand.

[1055] In some embodiments, a CD274-targeting oligonucleotide (e.g., an RNAi oligonucleotide) for reducing CD274 expression comprises (i) an antisense strand of 19-30 nucleotides in length, wherein the antisense strand comprises a nucleotide sequence comprising a region of complementarity to a CD274 mRNA target sequence, wherein the region of complementarity is set forth in SEQ ID NO: 248; and (ii) a sense strand of 19-50 nucleotides in length comprising a region of complementarity to the antisense strand, wherein the region of complementarity to the antisense strand is set forth in SEQ ID NO: 7, wherein the antisense and sense strands are separate strands which form an asymmetric duplex region having an overhang of 1-4 nucleotides at the 3′ terminus of the antisense strand.

[1056] In some embodiments, a CD274-targeting oligonucleotide (e.g., an RNAi oligonucleotide) for reducing CD274 expression comprises (i) an antisense strand of 19-30 nucleotides in length, wherein the antisense strand comprises a nucleotide sequence comprising a region of complementarity to a CD274 mRNA target sequence, wherein the region of complementarity is set forth in SEQ ID NO: 250; and (ii) a sense strand of 19-50 nucleotides in length comprising a region of complementarity to the antisense strand, wherein the region of complementarity to the antisense strand is set forth in SEQ ID NO: 9, wherein the antisense and sense strands are separate strands which form an asymmetric duplex region having an overhang of 1-4 nucleotides at the 3′ terminus of the antisense strand.

[1057] In some embodiments, a CD274-targeting oligonucleotide (e.g., an RNAi oligonucleotide) for reducing CD274 expression comprises (i) an antisense strand of 19-30 nucleotides in length, wherein the antisense strand comprises a nucleotide sequence comprising a region of complementarity to a CD274 mRNA target sequence, wherein the region of complementarity is set forth in SEQ ID NO: 261; and (ii) a sense strand of 19-50 nucleotides in length comprising a region of complementarity to the antisense strand, wherein the region of complementarity to the antisense strand is set forth in SEQ ID NO: 20, wherein the antisense and sense strands are separate strands which form an asymmetric duplex region having an overhang of 1-4 nucleotides at the 3′ terminus of the antisense strand.

[1058] In some embodiments, a CD274-targeting oligonucleotide (e.g., an RNAi oligonucleotide) for reducing CD274 expression comprises (i) an antisense strand of 19-30 nucleotides in length, wherein the antisense strand comprises a nucleotide sequence comprising a region of complementarity to a CD274 mRNA target sequence, wherein the region of complementarity is set forth in SEQ ID NO: 243; and (ii) a sense strand of 19-50 nucleotides in length comprising a region of complementarity to the antisense strand and a stem-loop at the 3′terminus, wherein the region of complementarity to the antisense strand is set forth in SEQ ID NO: 2, wherein the stem-loop is set forth as S1-L-S2, wherein S1 is complementary to S2 and wherein L forms a loop between S1 and S2 of 3 to 5 nucleotides in length, wherein the antisense and sense strands are separate strands which form an asymmetric duplex region having an overhang of 1-4 nucleotides at the 3′ terminus of the antisense strand.

[1059] In some embodiments, a CD274-targeting oligonucleotide (e.g., an RNAi oligonucleotide) for reducing CD274 expression comprises (i) an antisense strand of 19-30 nucleotides in length, wherein the antisense strand comprises a nucleotide sequence comprising a region of complementarity to a CD274 mRNA target sequence, wherein the region of complementarity is set forth in SEQ ID NO: 245; and (ii) a sense strand of 19-50 nucleotides in length comprising a region of complementarity to the antisense strand and a stem-loop at the 3′terminus, wherein the region of complementarity to the antisense strand is set forth in SEQ ID NO: 4, wherein the stem-loop is set forth as S1-L-S2, wherein S1 is complementary to S2 and wherein L forms a loop between S1 and S2 of 3 to 5 nucleotides in length, wherein the antisense and sense strands are separate strands which form an asymmetric duplex region having an overhang of 1-4 nucleotides at the 3′ terminus of the antisense strand.

[1060] In some embodiments, a CD274-targeting oligonucleotide (e.g., an RNAi oligonucleotide) for reducing CD274 expression comprises (i) an antisense strand of 19-30 nucleotides in length, wherein the antisense strand comprises a nucleotide sequence comprising a region of complementarity to a CD274 mRNA target sequence, wherein the region of complementarity is set forth in SEQ ID NO: 246; and (ii) a sense strand of 19-50 nucleotides in length comprising a region of complementarity to the antisense strand and a stem-loop at the 3′terminus, wherein the region of complementarity to the antisense strand is set forth in SEQ ID NO: 5, wherein the stem-loop is set forth as S1-L-S2, wherein S1 is complementary to S2 and wherein L forms a loop between S1 and S2 of 3 to 5 nucleotides in length, wherein the antisense and sense strands are separate strands which form an asymmetric duplex region having an overhang of 1-4 nucleotides at the 3′ terminus of the antisense strand.

[1061] In some embodiments, a CD274-targeting oligonucleotide (e.g., an RNAi oligonucleotide) for reducing CD274 expression comprises (i) an antisense strand of 19-30 nucleotides in length, wherein the antisense strand comprises a nucleotide sequence comprising a region of complementarity to a CD274 mRNA target sequence, wherein the region of complementarity is set forth in SEQ ID NO: 247; and (ii) a sense strand of 19-50 nucleotides in length comprising a region of complementarity to the antisense strand and a stem-loop at the 3′terminus, wherein the region of complementarity to the antisense strand is set forth in SEQ ID NO: 6, wherein the stem-loop is set forth as S1-L-S2, wherein S1 is complementary to S2 and wherein L forms a loop between S1 and S2 of 3 to 5 nucleotides in length, wherein the antisense and sense strands are separate strands which form an asymmetric duplex region having an overhang of 1-4 nucleotides at the 3′ terminus of the antisense strand.

[1062] In some embodiments, a CD274-targeting oligonucleotide (e.g., an RNAi oligonucleotide) for reducing CD274 expression comprises (i) an antisense strand of 19-30 nucleotides in length, wherein the antisense strand comprises a nucleotide sequence comprising a region of complementarity to a CD274 mRNA target sequence, wherein the region of complementarity is set forth in SEQ ID NO: 248; and (ii) a sense strand of 19-50 nucleotides in length comprising a region of complementarity to the antisense strand and a stem-loop at the 3′terminus, wherein the region of complementarity to the antisense strand is set forth in SEQ ID NO: 7, wherein the stem-loop is set forth as S1-L-S2, wherein S1 is complementary to S2 and wherein L forms a loop between S1 and S2 of 3 to 5 nucleotides in length, wherein the antisense and sense strands are separate strands which form an asymmetric duplex region having an overhang of 1-4 nucleotides at the 3′ terminus of the antisense strand.

[1063] In some embodiments, a CD274-targeting oligonucleotide (e.g., an RNAi oligonucleotide) for reducing CD274 expression comprises (i) an antisense strand of 19-30 nucleotides in length, wherein the antisense strand comprises a nucleotide sequence comprising a region of complementarity to a CD274 mRNA target sequence, wherein the region of complementarity is set forth in SEQ ID NO: 250; and (ii) a sense strand of 19-50 nucleotides in length comprising a region of complementarity to the antisense strand and a stem-loop at the 3′terminus, wherein the region of complementarity to the antisense strand is set forth in SEQ ID NO: 9, wherein the stem-loop is set forth as S1-L-S2, wherein S1 is complementary to S2 and wherein L forms a loop between S1 and S2 of 3 to 5 nucleotides in length, wherein the antisense and sense strands are separate strands which form an asymmetric duplex region having an overhang of 1-4 nucleotides at the 3′ terminus of the antisense strand.

[1064] In some embodiments, a CD274-targeting oligonucleotide (e.g., an RNAi oligonucleotide) for reducing CD274 expression comprises (i) an antisense strand of 19-30 nucleotides in length, wherein the antisense strand comprises a nucleotide sequence comprising a region of complementarity to a CD274 mRNA target sequence, wherein the region of complementarity is set forth in SEQ ID NO: 261; and (ii) a sense strand of 19-50 nucleotides in length comprising a region of complementarity to the antisense strand and a stem-loop at the 3′terminus, wherein the region of complementarity to the antisense strand is set forth in SEQ ID NO: 20, wherein the stem-loop is set forth as S1-L-S2, wherein S1 is complementary to S2 and wherein L forms a loop between S1 and S2 of 3 to 5 nucleotides in length, wherein the antisense and sense strands are separate strands which form an asymmetric duplex region having an overhang of 1-4 nucleotides at the 3′ terminus of the antisense strand.

[1065] In some embodiments, the disclosure provides an oligonucleotide (e.g., an RNAi oligonucleotide) for reducing CD274 expression, wherein the oligonucleotide comprises a sense strand and an antisense strand according to:

Sense Strand:
5′-mX-S-mX-mX-mX-mX-mX-mX-fX-fX-fX-fX-mX-mX-mX-
mX-mX-mX-mX-mX-mX-mX-mX-mX-mX-mX-mX-mX-[ademX-
L]-mX-mX-mX-mX-mX-mX-mX-mX-3′;

hybridized to:

Antisense Strand:
5′-[MePhosphonate-40-mX]-S-fX-S-fX-fX-fX-mX-fX-
mX-mX-fX-mX-mX-mX-fX-mX-mX-mX-mX-mX-mX-S-mX-S-
mX-3′;

wherein mX=2′-O-methyl modified nucleotide, fX=2′-fluoro modified nucleotide, —S—=phosphorothioate linkage, -=phosphodiester linkage, [MePhosphonate-4O-mX]=4′-O-monomethylphosphonate-2′-O-methyl modified nucleotide, and AdemX-L=Lipid molecule (e.g., C18) attached to a nucleotide.
In some embodiments, the disclosure provides an oligonucleotide (e.g., an RNAi oligonucleotide) for reducing CD274 expression, wherein the oligonucleotide comprises a sense strand and an antisense strand according to:

Sense Strand:
5′-mX-S-mX-mX-mX-mX-mX-mX-fX-fX-fX-fX-mX-mX-mX-
mX-mX-mX-mX-mX-mX-mX-mX-mX-mX-mX-mX-mX-[ademX-
GalNAc]-[ademX-GalNAc]-[ademX-GalNAc]-mX-mX-mX-
mX-mX-mX-3′;

hybridized to:

Antisense Strand:
5′-[MePhosphonate-40-mX]-S-fX-S-fX-S-fX-fX-mX-
fX-mX-mX-fX-mX-mX-mX-fX-mX-mX-mX-mX-mX-mX-S-mX-
S-mX-3′;

wherein mX=2′-O-methyl modified nucleotide, fX=2′-fluoro modified nucleotide, —S—=phosphorothioate linkage, -=phosphodiester linkage, [MePhosphonate-4O-mX]=4′-O-monomethylphosphonate-2′-O-methyl modified nucleotide, and ademX-GalNAc=GalNAc attached to a nucleotide.

[1066] In some embodiments, the disclosure provides an RNAi oligonucleotide for reducing CD274 expression, the oligonucleotide comprising a sense strand and an antisense strand, wherein the sense strand comprises the sequence and all of the modifications of 5′ [ademGs-C18][mG][mA][mU][mA][mU][mU][fU][fG][fC][fU][mG][mU][mC][mU][mU][mU][mA][mU][mA][mG][mC][mA][mG][mC][mC][mG][mA][mA][mA][mG][mG][mC][mU][mG][mC]-3′ (SEQ ID NO: 1050), and wherein the antisense strand comprises the sequence and all of the modifications of 5′ [MePhosphonate-4O-mUs][fAs][fUs][fA][fA][mA][fG][mA][mC][fA][mG][mC][mA][fA][mA][mU][mA][mU][mC][mCs][mGs][mG]-3′ (SEQ ID NO: 1005), wherein mC, mA, mG, mU=2′-OMe ribonucleosides; fA, fC, fG, fU=2′F ribonucleosides; s=phosphorothioate, and wherein ademA-GalNAc=GalNAc modified adenine nucleotide.

[1067] In some embodiments, the disclosure provides an RNAi oligonucleotide for reducing CD274 expression, the oligonucleotide comprising a sense strand and an antisense strand, wherein the sense strand comprises the sequence and all of the modifications of 5′ [mAs][mU][mG][mA][mG][mG][mA][fU][fA][fU][fU][mU][mG][mC][mU][mG][mU][mC][m U][mA][mG][mC][mA][mG][mC][mC][mG][ademA-GalNAc][ademA-GalNAc][ademA-GalNAc][mG][mG][mC][mU][mG][mC]-3′ (SEQ ID NO: 966), and wherein the antisense strand comprises the sequence and all of the modifications of 5′ [MePhosphonate-4O-mUs][fAs][fGs][fA][fC][mA][fG][mC][mA][fA][mA][mU][mA][fU][mC][mC][mU][mC][mA][mUs][mGs][mG]3′ (SEQ ID NO: 1002), wherein mC, mA, mG, mU=2′-OMe ribonucleosides; fA, fC, fG, fU=2′F ribonucleosides; s=phosphorothioate, and wherein ademA-GalNAc=GalNAc modified adenine nucleotide.

[1068] In some embodiments, the disclosure provides an RNAi oligonucleotide for reducing CD274 expression, the oligonucleotide comprising a sense strand and an antisense strand, wherein the sense strand comprises the sequence and all of the modifications of 5′ [mAs][mG][mG][mA][mU][mA][mU][fU][fU][fG][fC][mU][mG][mU][mC][mU][mU][mU][mA][mA][mG][mC][mA][mG][mC][mC][mG][ademA-GalNAc][ademA-GalNAc][ademA-GalNAc][mG][mG][mC][mU][mG][mC]-3′ (SEQ ID NO: 968), and wherein the antisense strand comprises the sequence and all of the modifications of 5′ [MePhosphonate-4O-mUs][fUs][fAs][fA][fA][mG][fA][mC][mA][fG][mC][mA][mA][fA][mU][mA][mU][mC][mC][mUs][mGs][mG]-3′ (SEQ ID NO: 1004), wherein mC, mA, mG, mU=2′-OMe ribonucleosides; fA, fC, fG, fU=2′F ribonucleosides; s=phosphorothioate, and wherein ademA-GalNAc=GalNAc modified adenine nucleotide.

[1069] In some embodiments, the disclosure provides an RNAi oligonucleotide for reducing CD274 expression, the oligonucleotide comprising a sense strand and an antisense strand, wherein the sense strand comprises the sequence and all of the modifications of 5′-[mGs][mG][mA][mU][mA][mU][mU][fU][fG][fC][fU][mG][mU][mC][mU][mU][mU][mA][m U][mA][mG][mC][mA][mG][mC][mC][mG][ademA-GalNAc][ademA-GalNAc][ademA-GalNAc][mG][mG][mC][mU][mG][mC]-3′ (SEQ ID NO: 969), and wherein the antisense strand comprises the sequence and all of the modifications of 5′-[MePhosphonate-4O-mUs][fAs][fUs][fA][fA][mA][fG][mA][mC][fA][mG][mC][mA][fA][mA][mU][mA][mU][mC][mCs][mGs][mG]-3′ (SEQ ID NO: 1005), wherein mC, mA, mG, mU=2′-OMe ribonucleosides; fA, fC, fG, fU=2′F ribonucleosides; s=phosphorothioate, and wherein ademA-GalNAc=GalNAc modified adenine nucleotide.

[1070] In some embodiments, the disclosure provides, an RNAi oligonucleotide for reducing CD274 expression, the oligonucleotide comprising a sense strand and an antisense strand, wherein the sense strand comprises the sequence and all of the modifications of 5′-[mAs][mU][mA][mU][mU][mU][mG][fC][fU][fG][fU][mC][mU][mU][mU][mA][mU][mA][m U][mA][mG][mC][mA][mG][mC][mC][mG][ademA-GalNAc][ademA-GalNAc][ademA-GalNAc][mG][mG][mC][mU][mG][mC]-3′ (SEQ ID NO: 970), and wherein the antisense strand comprises the sequence and all of the modifications of 5′-[MePhosphonate-4O-mUs][fAs][fUs][fA][fU][mA][fA][mA][mG][fA][mC][mA][mG][fC][mA][mA][mA][mU][mA][mUs][mGs][mG]-3′ (SEQ ID NO: 1006), wherein mC, mA, mG, mU=2′-OMe ribonucleosides; fA, fC, fG, fU=2′F ribonucleosides; s=phosphorothioate, and wherein ademA-GalNAc=GalNAc modified adenine nucleotide.

[1071] In some embodiments, the disclosure provides, an RNAi oligonucleotide for reducing CD274 expression, the oligonucleotide comprising a sense strand and an antisense strand, wherein the sense strand comprises the sequence and all of the modifications of 5′-[mAs][mU][mU][mU][mG][mC][mU][fG][fU][fC][fU][mU][mU][mA][mU][mA][mU][mU][m C][mA][mG][mC][mA][mG][mC][mC][mG][ademA-GalNAc][ademA-GalNAc][ademA-GalNAc][mG][mG][mC][mU][mG][mC]-3′ (SEQ ID NO: 971), and wherein the antisense strand comprises the sequence and all of the modifications of 5′-[MePhosphonate-4O-mUs][fGs][fAs][fA][fU][mA][fU][mA][mA][fA][mG][mA][mC][fA][mG][mC][mA][mA][mA][mUs][mGs][mG]-3′ (SEQ ID NO: 1007), wherein mC, mA, mG, mU=2′-OMe ribonucleosides; fA, fC, fG, fU=2′F ribonucleosides; s=phosphorothioate, and wherein ademA-GalNAc=GalNAc modified adenine nucleotide.

[1072] In some embodiments, the disclosure provides, an RNAi oligonucleotide for reducing CD274 expression, the oligonucleotide comprising a sense strand and an antisense strand, wherein the sense strand comprises the sequence and all of the modifications of 5′ [mGs][mC][mA][mA][mU][mA][mU][fG][fA][fC][fA][mA][mU][mU][mG][mA][mA][mU][m G][mA][mG][mC][mA][mG][mC][mC][mG][ademA-GalNAc][ademA-GalNAc][ademA-GalNAc][mG][mG][mC][mU][mG][mC]-3′ (SEQ ID NO: 973), and wherein the antisense strand comprises the sequence and all of the modifications of 5′-[MePhosphonate-4O-mUs][fCs][fAs][fU][fU][mC][fA][mA][mU][fU][mG][mU][mC][fA][mU][mA][mU][mU][mG][mCs][mGs][mG]-3′ (SEQ ID NO: 1009), wherein mC, mA, mG, mU=2′-OMe ribonucleosides; fA, fC, fG, fU=2′F ribonucleosides; s=phosphorothioate, and wherein ademA-GalNAc=GalNAc modified adenine nucleotide.

[1073] In some embodiments, the disclosure provides, an RNAi oligonucleotide for reducing CD274 expression, the oligonucleotide comprising a sense strand and an antisense strand, wherein the sense strand comprises the sequence and all of the modifications of 5′-[mGs][mA][mU][mA][mA][mG][mA][fA][fC][fA][fU][mU][mA][mU][mU][mC][mA][mA][m U][mA][mG][mC][mA][mG][mC][mC][mG][ademA-GalNAc][ademA-GalNAc][ademA-GalNAc][mG][mG][mC][mU][mG][mC]-3′ (SEQ ID NO: 984), and wherein the antisense strand comprises the sequence and all of the modifications of 5′-[MePhosphonate-4O-mUs][fAs][fUs][fU][fG][mA][fA][mU][mA][fA][mU][mG][mU][fU][mC][mU][mU][mA][mU][mCs][mGs][mG]-3′ (SEQ ID NO: 1020), wherein mC, mA, mG, mU=2′-OMe ribonucleosides; fA, fC, fG, fU=2′F ribonucleosides; s=phosphorothioate, and wherein ademA-GalNAc=GalNAc modified adenine nucleotide.

[1074] In some embodiments, the disclosure provides an oligonucleotide (e.g., an RNAi oligonucleotide) for reducing CD274 expression, wherein the oligonucleotide comprises a sense strand and an antisense strand according to:

Sense Strand:
5′-[ademXs-L][mX][mX][X][mX][mX][mX][fX][fX][fX]
[X][mX][mX][mX][mX][mX][mX][mX][mX][mX][mX][mX]
[mX][mX][mX][mX][mX][mX][mX][mX][mX][mX][mX][mX]
[mX][X]-3′

### Hybridized to:

Antisense Strand:
5′-[MePhosphonate-40-mXs][fXs][fXs][fX][fX][mX]
[fX][X][mX][fX][X][mX][mX][fX][mX][X][mX][mX]
[mX][mXs][mXs][mX]-3′;

wherein mX=2′-O-methyl modified nucleotide, fX=2′-fluoro modified nucleotide, s=phosphorothioate linkage,][=phosphodiester linkage, [MePhosphonate-4O-mX]=4′-O-monomethylphosphonate-2′-O-methyl modified nucleotide, and AdemX-L=Lipid molecule (e.g., C18) attached to a nucleotide.

[1075] In some embodiments, the disclosure provides an oligonucleotide (e.g., an RNAi oligonucleotide) for reducing CD274 expression, wherein the oligonucleotide comprises a sense strand and an antisense strand according to:

Sense Strand:
5′-[ademXs-C18][mX][X][mX][mX][mX][mX][X][fX]
[fX][fX][mX][mX][mX][mX][mX][mX][X][mX][mX][mX]
[mX][X][mX][mX][mX][mX][mX][mX][mX][mX][X][mX]
[mX][mX][X]-3′

### Hybridized to:

Antisense Strand:
5′-[MePhosphonate-40-mXs][fXs][fXs][fX][fX][mX]
[X][mX][mX][fX][mX][mX][mX][fX][mX][mX][mX][mX]
[mX][mXs][mXs][mX]-3′;

wherein mX=2′-O-methyl modified nucleotide, fX=2′-fluoro modified nucleotide, s=phosphorothioate linkage,][=phosphodiester linkage, [MePhosphonate-4O-mX]=4′-O-monomethylphosphonate-2′-O-methyl modified nucleotide, and AdemX-C18=C18 hydrocarbon chain attached to a nucleotide.

[1076] In some embodiments, an oligonucleotide for reducing expression of CD274 mRNA comprises a sense strand and an antisense strand comprising nucleotide sequences selected from:
[1077] (a) SEQ ID NOs: 484 and 725, respectively;
[1078] (b) SEQ ID NOs: 487 and 728, respectively; and,
[1079] (c) SEQ ID NOs: 491 and 732, respectively,
   wherein the sense and antisense strands are modified based on the pattern below

Sense Strand:
5′-[ademXs-C18][mX][mX][mX][mX][X][mX][fX][fX]
[X][fX][mX][mX][mX][mX][mX][mX][mX][mX][mX][mX]
[X][mX][mX][mX][X][X][mX][mX][mX][X][mX][mX]
[mX][X][mX]-3′

### Hybridized to:

Antisense Strand:
5′-[MePhosphonate-40-mXs][fXs][fXs][fX][fX][mX]
[fX][mX][mX][fX][mX][mX][mX][fX][mX][mX][mX][mX]
[mX][mXs][mXs][mX]-3′;

wherein mX=2′-O-methyl modified nucleotide, fX=2′-fluoro modified nucleotide, s=phosphorothioate linkage,][=phosphodiester linkage, [MePhosphonate-4O-mX]=4′-O-monomethylphosphonate-2′-O-methyl modified nucleotide, and AdemX-C18=C18 hydrocarbon chain attached to a nucleotide.

[1080] In some embodiments, the disclosure provides an oligonucleotide (e.g., an RNAi oligonucleotide) for reducing CD274 expression, wherein the oligonucleotide comprises a sense strand and an antisense strand according to:

Sense Strand:
5′-[ademXs-L][mX][mX][mX][mX][mX][mX][fX][X][fX]
[fX][mX][mX][mX][mX][mX][mX][mX][mX][mX][mX][mX]
[mX][mX][mX][mX][mX][mX][mX][X][mX][mX][mX][X]
[mX][mX]-3′

### Hybridized to:

Antisense Strand:
5′-[MePhosphonate-40-mXs][fXs][fX][fX][fX][mX]
[fX][mX][mX][fX][mX][mX][mX][X][mX][mX][X][mX]
[X][mXs][mXs][mX]-3′;

wherein mX=2′-O-methyl modified nucleotide, fX=2′-fluoro modified nucleotide, s=phosphorothioate linkage,][=phosphodiester linkage, [MePhosphonate-4O-mX]=4′-O-monomethylphosphonate-2′-O-methyl modified nucleotide, and AdemX-L=Lipid molecule (e.g., C18) attached to a nucleotide.

[1081] In some embodiments, the disclosure provides an oligonucleotide (e.g., an RNAi oligonucleotide) for reducing CD274 expression, wherein the oligonucleotide comprises a sense strand and an antisense strand according to:

Sense Strand:
5′-[ademXs-C18][mX][mX][mX][mX][X][mX][X][X]
[X][fX][X][mX][mX][mX][mX][mX][mX][mX][mX][X]
[mX][mX][mX][mX][mX][mX][mX][mX][mX][mX][mX]
[mX][mX][mX][mX]-3′

### Hybridized to:

Antisense Strand:
5′-[MePhosphonate-4O-mXs][fXs][fX][fX][fX][mX][fX]
[mX][mX][fX][mX][mX][mX][fX][mX][mX][mX][mX][mX]
[mXs][mXs][mX]-3′;

wherein mX=2′-O-methyl modified nucleotide, fX=2′-fluoro modified nucleotide, s=phosphorothioate linkage,][=phosphodiester linkage, [MePhosphonate-4O-mX]=4′-O-monomethylphosphonate-2′-O-methyl modified nucleotide, and AdemX-C18=C18 hydrocarbon chain attached to a nucleotide.

[1082] In some embodiments, an oligonucleotide for reducing expression of CD274 mRNA comprises a sense strand and an antisense strand comprising nucleotide sequences selected from:
[1083] (a) SEQ ID NOs: 484 and 725, respectively;
[1084] (b) SEQ ID NOs: 487 and 728, respectively; and,
[1085] (c) SEQ ID NOs: 491 and 732, respectively,
   wherein the sense and antisense strands are modified based on the pattern below

Sense Strand:
5′-[ademXs-C18][mX][mX][mX][mX][mX][mX][fX][fX]
[fX][fX][mX][mX][mX][mX][mX][mX][mX][mX][mX][mX]
[mX][mX][mX][mX][mX][mX][mX][mX][mX][mX][mX][mX]
[mX][mX][mX]-3′

### Hybridized to:

Antisense Strand:
5′-[MePhosphonate-4O-mXs][fXs][fX][fX][fX][mX][fX]
[mX][mX][fX][mX][mX][mX][fX][mX][mX][mX][mX][mX]
[mXs][mXs][mX]-3′;

wherein mX=2′-O-methyl modified nucleotide, fX=2′-fluoro modified nucleotide, s=phosphorothioate linkage,][=phosphodiester linkage, [MePhosphonate-4O-mX]=4′-O-monomethylphosphonate-2′-O-methyl modified nucleotide, and AdemX-C18=C18 hydrocarbon chain attached to a nucleotide.

[1086] In some embodiments, the disclosure provides an oligonucleotide (e.g., an RNAi oligonucleotide) for reducing CD274 expression, wherein the oligonucleotide comprises a sense strand and an antisense strand comprising nucleotide sequences selected from the group consisting of:
[1087] (a) SEQ ID NOs: 965 and 1001, respectively;
[1088] (b) SEQ ID NOs: 966 and 1002, respectively;
[1089] (c) SEQ ID NOs: 968 and 1004, respectively;
[1090] (d) SEQ ID NOs: 969 and 1005, respectively;
[1091] (e) SEQ ID NOs: 970 and 1006, respectively;
[1092] (f) SEQ ID NOs: 971 and 1007, respectively;
[1093] (g) SEQ ID NOs: 972 and 1008, respectively;
[1094] (h) SEQ ID NOs: 974 and 1010, respectively;
[1095] (i) SEQ ID NOs: 975 and 1011, respectively;
[1096] (j) SEQ ID NOs: 976 and 1012, respectively;
[1097] (k) SEQ ID NOs: 977 and 1013, respectively;
[1098] (l) SEQ ID NOs: 978 and 1014, respectively;
[1099] (m) SEQ ID NOs: 979 and 1015, respectively;
[1100] (n) SEQ ID NOs: 980 and 1016, respectively;
[1101] (o) SEQ ID NOs: 981 and 1017, respectively;
[1102] (p) SEQ ID NOs: 982 and 1018, respectively;
[1103] (q) SEQ ID NOs: 983 and 1019, respectively;
[1104] (r) SEQ ID NOs: 984 and 1020, respectively;
[1105] (s) SEQ ID NOs: 985 and 1021, respectively;
[1106] (t) SEQ ID NOs: 986 and 1022, respectively;
[1107] (u) SEQ ID NOs: 987 and 1023, respectively;
[1108] (v) SEQ ID NOs: 988 and 1024, respectively;
[1109] (w) SEQ ID NOs: 989 and 1025, respectively;
[1110] (x) SEQ ID NOs: 990 and 1026, respectively;
[1111] (y) SEQ ID NOs: 991 and 1027, respectively;
[1112] (z) SEQ ID NOs: 992 and 1028, respectively;
[1113] (aa) SEQ ID NOs: 993 and 1029, respectively;
[1114] (bb) SEQ ID NOs: 994 and 1030, respectively;
[1115] (cc) SEQ ID NOs: 995 and 1031, respectively;
[1116] (dd) SEQ ID NOs: 996 and 1032, respectively;
[1117] (ee) SEQ ID NOs: 997 and 1033, respectively;
[1118] (ff) SEQ ID NOs: 998 and 1034, respectively;
[1119] (gg) SEQ ID NOs: 999 and 1035, respectively;
[1120] (hh) SEQ ID NOs: 1000 and 1036, respectively; and,
[1121] (ii) SEQ ID NOs: 973 and 1009, respectively.

[1122] In some embodiments, a CD274-targeting oligonucleotide for reducing CD274 expression provided by the disclosure comprises a sense strand comprising the nucleotide sequence as set forth in SEQ ID NO: 966 and an antisense strand comprising the nucleotide sequence as set forth in SEQ ID NO: 1002. In some embodiments, a CD274-targeting oligonucleotide for reducing CD274 expression provided by the disclosure comprises a sense strand comprising the nucleotide sequence as set forth in SEQ ID NO: 968 and an antisense strand comprising the nucleotide sequence as set forth in SEQ ID NO: 1004. In some embodiments, a CD274-targeting oligonucleotide for reducing CD274 expression provided by the disclosure comprises a sense strand comprising the nucleotide sequence as set forth in SEQ ID NO: 969 and an antisense strand comprising the nucleotide sequence as set forth in SEQ ID NO: 1005. In some embodiments, a CD274-targeting oligonucleotide for reducing CD274 expression provided by the disclosure comprises a sense strand comprising the nucleotide sequence as set forth in SEQ ID NO: 1050 and an antisense strand comprising the nucleotide sequence as set forth in SEQ ID NO: 1005. In some embodiments, a CD274-targeting oligonucleotide for reducing CD274 expression provided by the disclosure comprises a sense strand comprising the nucleotide sequence as set forth in SEQ ID NO: 970 and an antisense strand comprising the nucleotide sequence as set forth in SEQ ID NO: 1006. In some embodiments, a CD274-targeting oligonucleotide for reducing CD274 expression provided by the disclosure comprises a sense strand comprising the nucleotide sequence as set forth in SEQ ID NO: 971 and an antisense strand comprising the nucleotide sequence as set forth in SEQ ID NO: 1007. In some embodiments, a CD274-targeting oligonucleotide for reducing CD274 expression provided by the disclosure comprises a sense strand comprising the nucleotide sequence as set forth in SEQ ID NO: 973 and an antisense strand comprising the nucleotide sequence as set forth in SEQ ID NO: 1009. In some embodiments, a CD274-targeting oligonucleotide for reducing CD274 expression provided by the disclosure comprises a sense strand comprising the nucleotide sequence as set forth in SEQ ID NO: 984 and an antisense strand comprising the nucleotide sequence as set forth in SEQ ID NO: 1020.

[1123] In some embodiments, a CD274-targeting oligonucleotide for reducing CD274 expression provided by the disclosure comprises an antisense strand comprising the nucleotide sequence of SEQ ID NO: 728 and a sense strand comprising the nucleotide sequence of SEQ ID NO: 487, wherein the sense strand comprises a saturated C18 hydrocarbon chain conjugated to the 5′ terminal nucleotide of the sense strand, and wherein each of the antisense and sense strands comprise at least one 2′-modified nucleotide and at least one modified internucleotide linkage.

[1124] In some embodiments, a CD274-targeting oligonucleotide for reducing CD274 expression provided by the disclosure comprises an antisense strand comprising the nucleotide sequence of SEQ ID NO: 728 and a sense strand comprising the nucleotide sequence of SEQ ID NO:487, wherein the sense strand comprises a saturated C18 hydrocarbon chain conjugated to the 2′ carbon of the ribose ring of the 5′ terminal nucleotide of the sense strand via a linker, and wherein each of the antisense and sense strands comprise at least one 2′-modified nucleotide and at least one modified internucleotide linkage.

[1125] In some embodiments, a CD274-targeting oligonucleotide for reducing CD274 expression provided by the disclosure comprises an antisense strand comprising the nucleotide sequence of SEQ ID NO: 725 and a sense strand comprising the nucleotide sequence of SEQ ID NO: 484, wherein the sense strand comprises a saturated C18 hydrocarbon chain conjugated to the 5′ terminal nucleotide of the sense strand, and wherein each of the antisense and sense strands comprise at least one 2′-modified nucleotide and at least one modified internucleotide linkage.

[1126] In some embodiments, a CD274-targeting oligonucleotide for reducing CD274 expression provided by the disclosure comprises an antisense strand comprising the nucleotide sequence of SEQ ID NO: 725 and a sense strand comprising the nucleotide sequence of SEQ ID NO: 484, wherein the sense strand comprises a saturated C18 hydrocarbon chain conjugated to the 2′ carbon of the ribose ring of the 5′ terminal nucleotide of the sense strand via a linker, and wherein each of the antisense and sense strands comprise at least one 2′-modified nucleotide and at least one modified internucleotide linkage.

[1127] In some embodiments, a CD274-targeting oligonucleotide for reducing CD274 expression provided by the disclosure comprises an antisense strand comprising the nucleotide sequence of SEQ ID NO: 732 and a sense strand comprising the nucleotide sequence of SEQ ID NO: 491, wherein the sense strand comprises a saturated C18 hydrocarbon chain conjugated to the 5′ terminal nucleotide of the sense strand, and wherein each of the antisense and sense strands comprise at least one 2′-modified nucleotide and at least one modified internucleotide linkage.

[1128] In some embodiments, a CD274-targeting oligonucleotide for reducing CD274 expression provided by the disclosure comprises an antisense strand comprising the nucleotide sequence of SEQ ID NO: 732 and a sense strand comprising the nucleotide sequence of SEQ ID NO: 491, wherein the sense strand comprises a saturated C18 hydrocarbon chain conjugated to the 2′ carbon of the ribose ring of the 5′ terminal nucleotide of the sense strand via a linker, and wherein each of the antisense and sense strands comprise at least one 2′-modified nucleotide and at least one modified internucleotide linkage.

[1129] In some embodiments, a CD274-targeting oligonucleotide for reducing CD274 expression provided by the disclosure comprises an antisense strand and a sense strand, wherein the antisense strand is 20 to 30 nucleotides in length and has a region of complementarity of 19 to 29 nucleotides to a target sequence of CD274 as set forth in any one of SEQ ID NOs: 2, 5, and 9, wherein the sense strand is 28 to 40 nucleotides in length and comprises at its 3′ end a stem-loop set forth as: S1-L-S2, wherein S1 is complementary to S2, and wherein L forms a loop between S1 and S2 of 3 to 5 nucleotides in length, wherein the antisense strand and the sense strand form a duplex region of at least 19 nucleotides in length, and wherein the sense strand comprises a C18 hydrocarbon chain conjugated to the 5′ terminal nucleotide of the sense strand.

In some embodiments, a CD274-targeting oligonucleotide for reducing CD274 expression provided by the disclosure comprises an antisense strand of about 20 to 22 nucleotides in length and a sense strand of about 28 to 40 nucleotides in length, wherein the antisense and sense strands from an asymmetric duplex region of about 20 to 22 base pairs comprising a 3′ terminal overhang of at least 1 nucleotide of the antisense strand, wherein the antisense strand comprises a region of complementarity of 19 to 21 nucleotides to a target sequence of CD274 as set forth in any one of SEQ ID NOs: 2, 5, and 9, wherein the sense strand comprises: (i) a stem-loop at the 3′ end of the sense strand, wherein the stem-loop comprises a nucleotide sequence represented by the formula: 5′-S1-L-S2-3′, wherein S1 is complementary to S2, and wherein L forms a loop between S1 and S2 of 3 to 5 nucleotides in length, and (ii) at least one C18 hydrocarbon chain conjugated to the 5′ terminal nucleotide of the sense strand, and wherein each of the antisense and sense strands comprise at least one 2′-modified nucleotide and at least one modified internucleotide linkage.

### Formulations

[1130] Various formulations (e.g., pharmaceutical formulations) have been developed for oligonucleotide use. For example, oligonucleotides (e.g., RNAi oligonucleotides) can be delivered to a subject or a cellular environment using a formulation that minimizes degradation, facilitates delivery and/or uptake, or provides another beneficial property to the oligonucleotides in the formulation. In some embodiments, provided herein are compositions comprising oligonucleotides (e.g., RNAi oligonucleotides) reduce the expression of CD274. Such compositions can be suitably formulated such that when administered to a subject, either into the immediate environment of a target cell or systemically, a sufficient portion of the oligonucleotides enter the cell to reduce CD274 expression. Any variety of suitable oligonucleotide formulations can be used to deliver oligonucleotides for the reduction of CD274 as disclosed herein. In some embodiments, an oligonucleotide is formulated in buffer solutions such as phosphate buffered saline solutions, liposomes, micellar structures, and capsids. Any of the oligonucleotides described herein may be provided not only as nucleic acids, but also in the form of a pharmaceutically acceptable salt.

[1131] Formulations of oligonucleotides with cationic lipids can be used to facilitate transfection of the oligonucleotides into cells. For example, cationic lipids, such as lipofectin, cationic glycerol derivatives, and polycationic molecules (e.g., polylysine), can be used. Suitable lipids include Oligofectamine, Lipofectamine (Life Technologies), NC388 (Ribozyme Pharmaceuticals, Inc., Boulder, Colo.), or FuGene 6 (Roche) all of which can be used according to the manufacturer's instructions.

[1132] Accordingly, in some embodiments, a formulation comprises a lipid nanoparticle. In some embodiments, an excipient comprises a liposome, a lipid, a lipid complex, a microsphere, a microparticle, a nanosphere or a nanoparticle, or may be otherwise formulated for administration to the cells, tissues, organs, or body of a subject in need thereof (see, e.g., Remington: THE SCIENCE AND PRACTICE OF PHARMACY, 22nd edition, Pharmaceutical Press, 2013).

[1133] In some embodiments, the formulations herein comprise an excipient. In some embodiments, an excipient confers to a composition improved stability, improved absorption, improved solubility and/or therapeutic enhancement of the active ingredient. In some embodiments, an excipient is a buffering agent (e.g., sodium citrate, sodium phosphate, a tris base, or sodium hydroxide) or a vehicle (e.g., a buffered solution, petrolatum, dimethyl sulfoxide, or mineral oil). In some embodiments, an oligonucleotide is lyophilized for extending its shelf-life and then made into a solution before use (e.g., administration to a subject). Accordingly, an excipient in a composition comprising any one of the oligonucleotides described herein may be a lyoprotectant (e.g., mannitol, lactose, polyethylene glycol or polyvinylpyrrolidone) or a collapse temperature modifier (e.g., dextran, Ficoll™ or gelatin).

[1134] In some embodiments, a pharmaceutical composition is formulated to be compatible with its intended route of administration. Examples of routes of administration include parenteral (e.g., intravenous, intramuscular, intraperitoneal, intradermal, subcutaneous), oral (e.g., inhalation), transdermal (e.g., topical), transmucosal and rectal administration.

[1135] Pharmaceutical compositions suitable for injectable use include sterile aqueous solutions (where water soluble) or dispersions and sterile powders for the extemporaneous preparation of sterile injectable solutions or dispersions. For intravenous administration, suitable carriers include physiological saline, bacteriostatic water, Cremophor EL™ (BASF, Parsippany, N.J.) or phosphate buffered saline (PBS). The carrier can be a solvent or dispersion medium containing, for example, water, ethanol, polyol (e.g., glycerol, propylene glycol, and liquid polyethylene glycol, and the like), and suitable mixtures thereof. In many cases, it will be preferable to include isotonic agents, for example, sugars, polyalcohols such as mannitol, sorbitol, sodium chloride in the composition. Sterile injectable solutions can be prepared by incorporating the oligonucleotides in a required amount in a selected solvent with one or a combination of ingredients enumerated above, as required, followed by filtered sterilization.

[1136] In some embodiments, a composition may contain at least about 0.1% of the therapeutic agent (e.g., a RNAi oligonucleotide for reducing CD274 expression) or more, although the percentage of the active ingredient(s) may be between about 1% to about 80% or more of the weight or volume of the total composition. Factors such as solubility, bioavailability, biological half-life, route of administration, product shelf life, as well as other pharmacological considerations will be contemplated by one skilled in the art of preparing such pharmaceutical formulations, and as such, a variety of dosages and treatment regimens may be desirable.

### Cytotoxic T Lymphocyte-Associated Antigen (CTLA4) Inhibitors

[1137] In some embodiments, the disclosure provides a CTLA4 inhibitor for use in combination with an oligonucleotide described herein. In some embodiments, the CTLA4 inhibitor inhibits association of CTLA4 with its ligand B7.1 or B7.2. In some embodiments, the CTLA4 inhibitor is specific for CTLA4.

[1138] In some embodiments, the CTLA4 inhibitor is an anti-CTLA4 antibody. In some embodiments, the antibody is a full-length antibody. In some embodiments, the antibody is an antibody fragment. In some embodiments, the CTLA4 inhibitor is a small molecule.

[1139] In some embodiments, the anti-CTLA4 antibody is Ipilimumab (MDX-010). In some embodiments, the anti-CTLA4 antibody is Tremelimumab.

[1140] In some embodiments, the anti-CTLA4 antibody is any anti-CTLA4 antibody known in the art, including, but not limited to, the anti-CTLA4 antibodies disclosed in Ascierto et al. “Anti-CTLA4 monoclonal antibodies: the past and the future in clinical application” J. of Translational Medicine. 9(196): 2011.

[1141] In some embodiments, the anti-CTLA4 antibody described herein binds to CTLA4 with an affinity of about 30 nM to about 100 nM. In some embodiments, the anti-CTLA4 antibody described herein binds to CTLA4 with an affinity of about 30 nM. In some embodiments, the anti-PD-L1 antibody described herein binds to CTLA4 with an affinity of about 40 nM. In some embodiments, the anti-CTLA4 antibody described herein binds to CTLA4 with an affinity of about 50 nM. In some embodiments, the anti-CTLA4 antibody described herein binds to CTLA4 with an affinity of about 60 nM. In some embodiments, the anti-CTLA4 antibody described herein binds to CTLA4 with an affinity of about 70 nM. In some embodiments, the anti-CTLA4 antibody described herein binds to CTLA4 with an affinity of about 80 nM. In some embodiments, the anti-CTLA4 antibody described herein binds to CTLA4 with an affinity of about 90 nM. In some embodiments, the anti-CTLA4 antibody described herein binds to CTLA4 with an affinity of about 100 nM.

[1142] In some embodiments, the antibody is generated using display technologies. Display technologies used to generate antibody polypeptides include any of the display techniques (e.g. display library screening techniques). In some embodiments, synthetic antibodies are designed, selected, or optimized by screening target antigens using display technologies (e.g. phage display technologies). Phage display libraries may comprise millions to billions of phage vectors, each expressing unique antibody fragments on their viral coats. Such libraries may provide richly diverse resources that are used to select potentially hundreds of antibody fragments with diverse levels of affinity for one or more antigens of interest (McCafferty, et al., 1990. Nature. 348:552-4; Edwards, B. M. et al., 2003. JMB. 334: 103-18; Schofield, D. et al., 2007. Genome Biol. 8, R254 and Pershad, K. et al., 2010. Protein Engineering Design and Selection. 23:279-88; the contents of each of which are herein incorporated by reference in their entirety). Often, the antibody fragments present in such libraries comprise scFv antibody fragments, comprising a fusion protein of V_{H} and V_{L} antibody domains joined by a flexible linker. In some cases, scFvs may contain the same sequence with the exception of unique sequences encoding variable loops of the CDRs. In some cases, scFvs are expressed as fusion proteins, linked to viral coat proteins (e.g. the N-terminus of the viral pill coat protein). VL chains may be expressed separately for assembly with VH chains in the periplasm prior to complex incorporation into viral coats. Precipitated library members may be sequenced from the bound phage to obtain cDNA encoding desired scFvs. Antibody variable domains or CDRs from such sequences may be directly incorporated into antibody sequences for recombinant antibody production or mutated and utilized for further optimization through in vitro affinity maturation.

[1143] In some embodiments, the sequences of the polypeptides to be encoded in the viral genomes are produced using yeast surface display technology. In some embodiments, recombinant antibodies are developed by displaying the antibody fragment of interest as a fusion to on the surface of the yeast, where the protein interacts with proteins and small molecules in a solution. scFvs with affinity toward desired receptors may be isolated from the yeast surface using magnetic separation and flow cytometry. Several cycles of yeast surface display and isolation may be done to attain scFvs with desired properties through directed evolution.

[1144] Methods for determining the affinity of an antibody for its antigen are known in the art. An exemplary method for determining binding affinity employs surface plasmon resonance. Surface plasmon resonance is an optical phenomenon that allows for the analysis of realtime biospecific interactions by detection of alterations in protein concentrations within a biosensor matrix, for example using the BIAcore system (Pharmacia Biosensor AB, Uppsala, Sweden and Piscataway, N.J.). For further descriptions, see Jonsson, U., et al. (1993) Ann. Biol. Clin. 51: 19-26; Jonsson, U., i (1991) Biotechniques 11:620-627; Johnsson, B., et al. (1995) J. Mol. Recognit. 8: 125-131; and Johnsson, B., et al. (1991) Anal. Biochem. 198:268-277.

### Methods of Use

### Reducing CD274 Expression

[1145] In some embodiments, the disclosure provides methods for contacting or delivering to a cell or population of cells an effective amount of oligonucleotides provided herein (e.g., RNAi oligonucleotides) to reduce CD274 expression. In some embodiments, a reduction of CD274 expression is determined by measuring a reduction in the amount or level of CD274 mRNA, PD-L1 protein, PD-L1 activity in a cell. The methods include those described herein and known to one of ordinary skill in the art.

[1146] Methods provided herein are useful in any appropriate cell type. In some embodiments, a cell is any cell that expresses CD274 mRNA (e.g., hepatocytes). In some embodiments, the cell is a primary cell obtained from a subject. In some embodiments, the primary cell has undergone a limited number of passages such that the cell substantially maintains its natural phenotypic properties. In some embodiments, a cell to which the oligonucleotide is delivered is ex vivo or in vitro (i.e., can be delivered to a cell in culture or to an organism in which the cell resides).

[1147] In some embodiments, the oligonucleotides herein (e.g., RNAi oligonucleotides) are delivered to a cell or population of cells using a nucleic acid delivery method known in the art including, but not limited to, injection of a solution containing the oligonucleotides, bombardment by particles covered by the oligonucleotides, exposing the cell or population of cells to a solution containing the oligonucleotides, or electroporation of cell membranes in the presence of the oligonucleotides. Other methods known in the art for delivering oligonucleotides to cells may be used, such as lipid-mediated carrier transport, chemical-mediated transport, and cationic liposome transfection such as calcium phosphate, and others.

[1148] In some embodiments, reduction of CD274 expression is determined by an assay or technique that evaluates one or more molecules, properties, or characteristics of a cell or population of cells associated with CD274 expression, or by an assay or technique that evaluates molecules that are directly indicative of CD274 expression in a cell or population of cells (e.g., CD274 mRNA or PD-L1 protein). In some embodiments, the extent to which an oligonucleotide provided herein reduces CD274 expression is evaluated by comparing CD274 expression in a cell or population of cells contacted with the oligonucleotide to an appropriate control (e.g., an appropriate cell or population of cells not contacted with the oligonucleotide or contacted with a control oligonucleotide). In some embodiments, a control amount or level of CD274 expression in a control cell or population of cells is predetermined, such that the control amount or level need not be measured in every instance the assay or technique is performed. The predetermined level or value can take a variety of forms. In some embodiments, a predetermined level or value can be single cut-off value, such as a median or mean.

[1149] In some embodiments, contacting or delivering an oligonucleotide described herein (e.g., an RNAi oligonucleotide) to a cell or a population of cells results in a reduction in CD274 expression in a cell or population of cells not contacted with the oligonucleotide or contacted with a control oligonucleotide. In some embodiments, the reduction in CD274 expression is about 1% or lower, about 5% or lower, about 10% or lower, about 15% or lower, about 20% or lower, about 25% or lower, about 30% or lower, about 35% or lower, about 40% or lower, about 45% or lower, about 50% or lower, about 55% or lower, about 60% or lower, about 70% or lower, about 80% or lower, or about 90% or lower relative to a control amount or level of CD274 expression. In some embodiments, the control amount or level of CD274 expression is an amount or level of CD274 mRNA and/or PD-L1 protein in a cell or population of cells that has not been contacted with an oligonucleotide herein. In some embodiments, the effect of delivery of an oligonucleotide herein to a cell or population of cells according to a method herein is assessed after any finite period or amount of time (e.g., minutes, hours, days, weeks, months). For example, in some embodiments, CD274 expression is determined in a cell or population of cells at least about 4 hours, about 8 hours, about 12 hours, about 18 hours, about 24 hours; or at least about 1 day, about 2 days, about 3 days, about 4 days, about 5 days, about 6 days, about 7 days, about 8 days, about 9 days, about 10 days, about 11 days, about 12 days, about 13 days, about 14 days, about 21 days, about 28 days, about 35 days, about 42 days, about 49 days, about 56 days, about 63 days, about 70 days, about 77 days, or about 84 days or more after contacting or delivering the oligonucleotide to the cell or population of cells. In some embodiments, CD274 expression is determined in a cell or population of cells at least about 1 month, about 2 months, about 3 months, about 4 months, about 5 months, or about 6 months or more after contacting or delivering the oligonucleotide to the cell or population of cells.

[1150] In some embodiments, an oligonucleotide provided herein (e.g., an RNAi oligonucleotide) is delivered in the form of a transgene that is engineered to express in a cell the oligonucleotide or strands comprising the oligonucleotide (e.g., its sense and antisense strands). In some embodiments, an oligonucleotide herein is delivered using a transgene engineered to express any oligonucleotide disclosed herein. Transgenes may be delivered using viral vectors (e.g., adenovirus, retrovirus, vaccinia virus, poxvirus, adeno-associated virus, or herpes simplex virus) or non-viral vectors (e.g., plasmids or synthetic mRNAs). In some embodiments, transgenes can be injected directly to a subject.

[1151] In some embodiments, contacting or delivering an oligonucleotide described herein (e.g., an RNAi oligonucleotide) to the tumor draining lymph node results in a reduction in CD274 expression in a tumor draining lymph node not contacted with the oligonucleotide or contacted with a control oligonucleotide. In some embodiments, the reduction in CD274 expression in the tumor draining lymph node is about 1% or lower, about 5% or lower, about 10% or lower, about 15% or lower, about 20% or lower, about 25% or lower, about 30% or lower, about 35% or lower, about 40% or lower, about 45% or lower, about 50% or lower, about 55% or lower, about 60% or lower, about 70% or lower, about 80% or lower, or about 90% or lower relative to a control amount or level of CD274 expression in a tumor draining lymph node not treated with a CD274 oligonucleotide. In some embodiments, the control amount or level of CD274 expression is an amount or level of CD274 mRNA and/or PD-L1 protein in a cell or population of cells that has not been contacted with an oligonucleotide herein.

[1152] In some embodiments, contacting or delivering an oligonucleotide described herein (e.g., an RNAi oligonucleotide) to the tumor microenvironment results in a reduction in CD274 expression in a tumor microenvironment not contacted with the oligonucleotide or contacted with a control oligonucleotide. In some embodiments, the reduction in CD274 expression in the tumor microenvironment is about 1% or lower, about 5% or lower, about 10% or lower, about 15% or lower, about 20% or lower, about 25% or lower, about 30% or lower, about 35% or lower, about 40% or lower, about 45% or lower, about 50% or lower, about 55% or lower, about 60% or lower, about 70% or lower, about 80% or lower, or about 90% or lower relative to a control amount or level of CD274 expression in a tumor microenvironment not treated with a CD274 oligonucleotide. In some embodiments, the control amount or level of CD274 expression is an amount or level of CD274 mRNA and/or PD-L1 protein in a cell or population of cells that has not been contacted with an oligonucleotide herein.

### Combination of CD274 Oligonucleotide and CTLA4 Inhibitors

[1153] In some embodiments, the disclosure provides CD274 oligonucleotides for use, or adaptable for use, to treat a subject (e.g., a human having a disease, disorder or condition associated with CD274 expression) that has received or is receiving a CTLA4 inhibitor.

[1154] In some embodiments, methods described herein comprise selecting a subject having a disease, disorder or condition associated with CD274 expression and/or CTLA4 expression or is predisposed to the same. In some instances, the methods can include selecting an individual having a marker for a disease associated with CD274 expression and/or CTLA4 expression such as cancer or other chronic lymphoproliferative disorders.

[1155] Likewise, and as detailed herein, the methods also may include steps such as measuring or obtaining a baseline value for a marker of CD274 expression and/or CTLA4 expression, and then comparing such obtained value to one or more other baseline values or values obtained after being administered the oligonucleotide to assess the effectiveness of treatment.

[1156] In some embodiments, the disclosure provides methods of treating a subject having, suspected of having, or at risk of developing a disease, disorder, or condition with a CD274 oligonucleotide herein, wherein the subject has received or is receiving a CTLA4 inhibitor. In some embodiments, the disclosure provides methods of treating a subject having, suspected of having, or at risk of developing a disease, disorder, or condition with a CTLA4 inhibitor described herein, wherein the subject has received or is receiving a CD274 oligonucleotide described herein.

[1157] In some aspects, the disclosure provides methods of treating or attenuating the onset or progression of a disease, disorder or condition associated with CD274 expression using a CD274 oligonucleotide herein in combination with a CTLA4 inhibitor. In other aspects, the disclosure provides methods to achieve one or more therapeutic benefits in a subject having a disease, disorder or condition associated with CD274 expression using a CD274 oligonucleotide herein in combination with a CTLA4 inhibitor. In some embodiments of the methods herein, the subject is treated by administering a therapeutically effective amount of a CD274 oligonucleotide herein in combination with a CTLA4 inhibitor. In some embodiments of the methods herein, the subject is treated by administering a therapeutically effective amount of a CD274 oligonucleotide herein to a subject that has received or is receiving a CTLA4 inhibitor. In some embodiments of the methods herein, the subject is treated by administering a therapeutically effective amount of a CTLA4 inhibitor to a subject that has received or is receiving a CD274 oligonucleotide herein. In some embodiments, the subject is treated therapeutically. In some embodiments, the subject is treated prophylactically.

[1158] In some embodiments of the methods herein, one or more CD274 oligonucleotides herein, or a pharmaceutical composition comprising one or more CD274 oligonucleotides, is administered to a subject having a disease, disorder or condition associated with CD274 expression that has received or is receiving a CTLA4 inhibitor, such that CD274 expression is reduced in the subject, thereby treating the subject. In some embodiments, an amount or level of CD274 mRNA is reduced in the subject. In some embodiments, an amount or level of CD274 and/or protein is reduced in the subject. In some embodiments of the methods herein, one or more CD274 oligonucleotides herein, or a pharmaceutical composition comprising one or more CD274 oligonucleotides, is administered to a subject having a disease, disorder or condition associated with CD274 expression that has received or is receiving a CTLA4 inhibitor such that CD274 expression and CTLA4 signaling is reduced in the subject, thereby treating the subject. In some embodiments, an amount or level of CD274 mRNA and CTLA4 signaling is reduced in the subject. In some embodiments, an amount or level of CD274 and/or protein is reduced in the subject and CTLA4 signaling is reduced in the subject.

[1159] In some embodiments, a therapeutically effective amount of a CD274 oligonucleotide and/or CTLA4 inhibitor is administered to a subject. A therapeutically acceptable amount may be an amount that can therapeutically treat a disease or disorder. The appropriate dosage for any one subject will depend on certain factors, including the subject's size, body surface area, age, the particular composition to be administered, the active ingredient(s) in the composition, time and route of administration, general health, and other drugs being administered concurrently.

[1160] In some embodiments, a subject is administered any one of the compositions herein either enterally (e.g., orally, by gastric feeding tube, by duodenal feeding tube, via gastrostomy or rectally), parenterally (e.g., subcutaneous injection, intravenous injection or infusion, intra-arterial injection or infusion, intraosseous infusion, intramuscular injection, intracerebral injection, intracerebroventricular injection, intrathecal), topically (e.g., epicutaneous, inhalational, via eye drops, or through a mucous membrane), or by direct injection into a target organ. Typically, oligonucleotides herein are administered intravenously or subcutaneously.

[1161] As a non-limiting set of examples, the oligonucleotides herein would typically be administered quarterly (once every three months), bi-monthly (once every two months), monthly or weekly. For example, the oligonucleotides may be administered every week or at intervals of two, or three weeks. Alternatively, the oligonucleotides may be administered daily. In some embodiments, a subject is administered one or more loading doses of the oligonucleotide followed by one or more maintenance doses of the oligonucleotide.

[1162] In some embodiments, a CTLA4 inhibitor (e.g., an anti-CTLA4 antibody) herein is administered quarterly (once every three months), bi-monthly (once every two months), monthly or weekly. For example, the inhibitor is administered every week or at intervals of two, or three weeks. Alternatively, the inhibitor is administered daily.

[1163] In some embodiments the oligonucleotides herein are administered in combination with a CTLA4 inhibitor. In some embodiments the oligonucleotide and inhibitor are administered in combination concurrently, sequentially (in any order), or intermittently. For example, the oligonucleotide and inhibitor may be co-administered concurrently. Alternatively, the oligonucleotide may be administered and followed any amount of time later (e.g., one hour, one day, one week or one month) by the administration of the inhibitor, or vice versa.

[1164] In some embodiments, the subject to be treated is a human or non-human primate or other mammalian subject. Other exemplary subjects include domesticated animals such as dogs and cats; livestock such as horses, cattle, pigs, sheep, goats, and chickens; and animals such as mice, rats, guinea pigs, and hamsters.

[1165] In some embodiments, the disclosure provides a method of treating cancer in a subject, the method comprising (i) administering an oligonucleotide comprising an antisense strand of 15 to 30 nucleotides in length and a sense strand of 15 to 40 nucleotides in length, wherein the antisense and sense strands form a duplex region, wherein the antisense strand comprises a region of complementarity to a CD274 mRNA target sequence, and wherein the region of complementarity is at least 15 contiguous nucleotides in length, and (ii) administering a CTLA-4 inhibitor.

[1166] In some embodiments, the disclosure provides a method of treating a disease, disorder or condition associated with activated CD274 expression, comprising administering to a subject in need thereof an RNAi oligonucleotide, and a CTLA-4 inhibitor, wherein the oligonucleotide comprises an antisense strand of 15 to 30 nucleotides in length and a sense strand of 15 to 40 nucleotides in length, wherein the antisense and sense strands form a duplex region, wherein the antisense strand comprises a region of complementarity to a CD274 mRNA target sequence, and wherein the region of complementarity is at least 15 contiguous nucleotides in length.

### Combination of CD274 Oligonucleotide and Cancer Therapy

[1167] In some embodiments, the disclosure provides CD274 oligonucleotides for use, or adaptable for use, to treat a subject (e.g., a human having a disease, disorder or condition associated with CD274 expression) that has received or is receiving a cancer therapy. In some embodiments, the cancer therapy is chemotherapy, immunotherapy, radiation therapy, resection surgery, targeted therapy, transplant (solid tissue or stem cell) or a combination thereof.

[1168] In some embodiments, methods described herein comprise selecting a subject having a disease, disorder or condition associated with CD274 expression or is predisposed to the same. In some embodiments, the methods comprise selecting an individual having a marker for a disease associated with CD274 expression such as cancer.

[1169] In some embodiments, the disclosure provides methods of treating a subject having, suspected of having, or at risk of developing a disease, disorder, or condition with a CD274 oligonucleotide herein, wherein the subject has received or is receiving a cancer therapy.

[1170] In some embodiments, the disclosure provides methods of treating or attenuating the onset or progression of a disease, disorder or condition associated with CD274 expression using a CD274 oligonucleotide herein in combination with a cancer therapy. In some embodiments, the disclosure provides methods of treating or attenuating the onset or progression of a disease, disorder or condition associated with CD274 expression using a CD274 oligonucleotide herein in combination with one or more of chemotherapy, immunotherapy, radiation therapy, resection surgery, targeted therapy, transplant (solid tissue or stem cell). In some embodiments, the disclosure provides methods to achieve one or more therapeutic benefits in a subject having a disease, disorder, or condition associated with CD274 expression using a CD274 oligonucleotide herein in combination with a cancer therapy. In some embodiments of the methods herein, the subject is treated by administering a therapeutically effective amount of a CD274 oligonucleotide herein in combination with a cancer therapy. In some embodiments of the methods herein, the subject is treated by administering a therapeutically effective amount of a CD274 oligonucleotide herein to a subject that has received or is receiving a cancer therapy. In some embodiments of the methods herein, the subject is treated by administering a therapeutically effective amount of a cancer therapy to a subject that has received or is receiving a CD274 oligonucleotide herein.

[1171] In some embodiments of the methods herein, one or more CD274 oligonucleotides herein, or a pharmaceutical composition comprising one or more CD274 oligonucleotides, is administered to a subject having a disease, disorder or condition associated with CD274 expression that has received or is receiving a cancer therapy, such that CD274 expression is reduced in the subject, thereby treating the subject. In some embodiments, an amount or level of CD274 mRNA is reduced in the subject. In some embodiments, an amount or level of CD274 and/or protein is reduced in the subject.

[1172] In some embodiments, a therapeutically effective amount of a CD274 oligonucleotide and/or cancer therapy is administered to a subject. A therapeutically acceptable amount may be an amount that can therapeutically treat a disease or disorder. The appropriate dosage for any one subject will depend on certain factors, including the subject's size, body surface area, age, the particular composition to be administered, the active ingredient(s) in the composition, time and route of administration, general health, and other drugs being administered concurrently.

[1173] In some embodiments, the disclosure provides a method of treating cancer in a subject, the method comprising (i) administering an oligonucleotide comprising an antisense strand of 15 to 30 nucleotides in length and a sense strand of 15 to 40 nucleotides in length, wherein the antisense and sense strands form a duplex region, wherein the antisense strand comprises a region of complementarity to a CD274 mRNA target sequence, and wherein the region of complementarity is at least 15 contiguous nucleotides in length, and (ii) administering a cancer therapy.

[1174] In some embodiments, the disclosure provides a method of treating a disease, disorder or condition associated with activated CD274 expression, comprising administering to a subject in need thereof an RNAi oligonucleotide, and a cancer therapy, wherein the oligonucleotide comprises an antisense strand of 15 to 30 nucleotides in length and a sense strand of 15 to 40 nucleotides in length, wherein the antisense and sense strands form a duplex region, wherein the antisense strand comprises a region of complementarity to a CD274 mRNA target sequence, and wherein the region of complementarity is at least 15 contiguous nucleotides in length.

In some embodiments, the disclosure provides a method of treating a disease, disorder or condition associated with activated CD274 expression, comprising administering to a subject in need thereof an RNAi oligonucleotide, and a cancer therapy, wherein the oligonucleotide comprises a sense strand comprising SEQ ID NO: 1050 and an antisense strand comprising SEQ ID NO: 1005.

[1175] In some embodiments, the disclosure provides a method of treating a disease, disorder or condition associated with activated CD274 expression, comprising administering to a subject in need thereof an RNAi oligonucleotide, and a cancer therapy, wherein the oligonucleotide comprises a sense strand and an antisense strand comprising nucleotide sequences selected from:
[1176] (a) SEQ ID NOs: 484 and 725, respectively;
[1177] (b) SEQ ID NOs: 487 and 728, respectively; and,
[1178] (c) SEQ ID NOs: 491 and 732, respectively,
   wherein the sense and antisense strands are modified based on the pattern below

Sense Strand:
5′-[ademXs-C18][mX][mX][mX][mX][mX][mX][fX][fX]
[fX][fX][mX][mX][mX][mX][mX][mX][mX][mX][mX][mX]
[mX][mX][mX][mX][mX][mX][mX][mX][mX][mX][mX][mX]
[mX][mX][mX]-3′

### Hybridized to:

Antisense Strand:
5′-[MePhosphonate-4O-mXs][fXs][fXs][fX][fX][mX][fX]
[mX][mX][fX][mX][mX][mX][fX][mX][mX][mX][mX][mX]
[mXs][mXs][mX]-3′;

wherein mX=2′-O-methyl modified nucleotide, fX=2′-fluoro modified nucleotide, s=phosphorothioate linkage,][=phosphodiester linkage, [MePhosphonate-4O-mX]=4′-O-monomethylphosphonate-2′-O-methyl modified nucleotide, and AdemX-C18=C18 hydrocarbon chain attached to a nucleotide.

[1179] In some embodiments, the disclosure provides a method of treating a disease, disorder or condition associated with activated CD274 expression, comprising administering to a subject in need thereof an RNAi oligonucleotide, and a cancer therapy, wherein the oligonucleotide comprises a sense strand and an antisense strand comprising nucleotide sequences selected from:
[1180] (a) SEQ ID NOs: 484 and 725, respectively;
[1181] (b) SEQ ID NOs: 487 and 728, respectively; and,
[1182] (c) SEQ ID NOs: 491 and 732, respectively,
   wherein the sense and antisense strands are modified based on the pattern below

Sense Strand:
5′-[ademXs-C18][mX][mX][mX][mX][mX][mX[fX][fX][fX]
[fX][mX][mX][mX][mX][mX][mX][mX][mX][mX][mX][mX]
[mX][mX][mX][mX][mX][mX][mX][mX][mX][mX][mX][mX]
[mX][mX]-3′

### Hybridized to:

Antisense Strand:
5′-[MePhosphonate-4O-mXs][fXs][fX][fX][fX][mX][fX]
[mX][mX][fX][mX][mX][mX][fX][mX][mX][mX][mX][mX]
[mXs][mXs][mX]-3′ ;

wherein mX=2′-O-methyl modified nucleotide, fX=2′-fluoro modified nucleotide, s=phosphorothioate linkage,][=phosphodiester linkage, [MePhosphonate-4O-mX]=4′-O-monomethylphosphonate-2′-O-methyl modified nucleotide, and AdemX-C18=C18 hydrocarbon chain attached to a nucleotide.

### Cancers

[1183] In some embodiments, the CD274 oligonucleotide, alone or in combination with a CTLA4 inhibitor are used to treat a cancer or a tumor. In some embodiments, the tumor is a primary tumor. In some embodiments, the tumor is a metastatic tumor. In some embodiments, the tumor is a refractory tumor. In some embodiments, the tumor is a Stage I, Stage II, Stage III, or Stage IV tumor. In some embodiments, the tumor is a solid-tumor. Solid-tumors refer to conditions where the cancer forms a mass.

[1184] In some embodiments, the cancer is a thyroid cancer, papillary thyroid carcinoma, head and neck cancer, liver cancer, colorectal cancer, pancreatic cancer, breast cancer, ovarian cancer, lung cancer, carcinoma, blastoma, medulloblastoma, retinoblastoma, sarcoma, liposarcoma, synovial cell sarcoma, neuroendocrine tumors, carcinoid tumors, gastrinoma, islet cell cancer, mesothelioma, schwannoma, acoustic neuroma, meningioma, adenocarcinoma, lymphoid malignancies, squamous cell cancer, epithelial squamous cell cancer, small-cell lung cancer (SCLC), non-small cell lung cancer (NSCLC), adenocarcinoma of the lung, squamous carcinoma of the lung, cancer of the peritoneum, hepatocellular cancer, gastric or stomach cancer, gastrointestinal cancer, glioblastoma, cervical cancer, bladder cancer, hepatoma, metastatic breast cancer, colon cancer, rectal cancer, endometrial or uterine carcinoma, salivary gland carcinoma, kidney or renal cancer, prostate cancer, vulval cancer, hepatic carcinoma, anal carcinoma, penile carcinoma, Merkel cell cancer, testicular cancer, esophageal cancer, or tumors of the biliary tract. In some embodiments, the cancer is refractory to anti-PD1, anti-PDL1 and/or anti-CTLA4 therapy. In some embodiments, the cancer is a pancreatic cancer or lung cancer. In some embodiments, the cancer comprises tumors with immunosuppressive tumor microenvironments. In some embodiments, the cancer is resistant to immune checkpoint therapy. In some embodiments, the cancer is partially resistant to immune checkpoint therapy. In some embodiments, the cancer is sensitive to immune checkpoint therapy.

[1185] In some embodiments, the CD274 oligonucleotide, alone or in combination with a CLTA4 inhibitor reduces tumor volume. Tumor volume is measured using methods know to one of skill in the art. For example, extracted tumors are measured manually using calipers. Other methods include imagine methods such as ultrasound and MRI. In some embodiments, the oligonucleotide conjugate reduces tumor volume by at least 5%, at least 10%, at least 20%, at least 30%, at least 40%, at least 50%, at least 60%, at least 70%, at least 80%, or at least 90% compared to an untreated tumor.

### Treatment Methods

[1186] The disclosure provides oligonucleotides (e.g., RNAi oligonucleotides) for use as a medicament, in particular for use in a method for the treatment of diseases, disorders, and conditions associated with expression of CD274. The disclosure also provides oligonucleotides for use, or adaptable for use, to treat a subject (e.g., a human having a disease, disorder or condition associated with CD274 expression) that would benefit from reducing CD274 expression. In some respects, the disclosure provides oligonucleotides for use, or adapted for use, to treat a subject having a disease, disorder or condition associated with expression of CD274. The disclosure also provides oligonucleotides for use, or adaptable for use, in the manufacture of a medicament or pharmaceutical composition for treating a disease, disorder or condition associated with CD274 expression. In some embodiments, the oligonucleotides for use, or adaptable for use, target CD274 mRNA and reduce CD274 expression (e.g., via the RNAi pathway). In some embodiments, the oligonucleotides for use, or adaptable for use, target CD274 mRNA and reduce the amount or level of CD274 mRNA, PD-L1 protein and/or CD274 activity.

[1187] In addition, in some embodiments of the methods herein, a subject having a disease, disorder, or condition associated with CD274 expression or is predisposed to the same is selected for treatment with an oligonucleotide provided herein (e.g., an RNAi oligonucleotide). In some embodiments, the method comprises selecting an individual having a marker (e.g., a biomarker) for a disease, disorder, or condition associated with CD274 expression or predisposed to the same, such as, but not limited to, CD274 mRNA, PD-L1 protein, or a combination thereof. Likewise, and as detailed below, some embodiments of the methods provided by the disclosure include steps such as measuring or obtaining a baseline value for a marker of CD274 expression (e.g., CD274 mRNA), and then comparing such obtained value to one or more other baseline values or values obtained after the subject is administered the oligonucleotide to assess the effectiveness of treatment.

[1188] The disclosure also provides methods of treating a subject having, suspected of having, or at risk of developing a disease, disorder or condition associated with a CD274 expression with an oligonucleotide provided herein. In some aspects, the disclosure provides methods of treating or attenuating the onset or progression of a disease, disorder or condition associated with CD274 expression using the oligonucleotides herein. In other aspects, the disclosure provides methods to achieve one or more therapeutic benefits in a subject having a disease, disorder, or condition associated with CD274 expression using the oligonucleotides provided herein. In some embodiments of the methods herein, the subject is treated by administering a therapeutically effective amount of any one or more of the oligonucleotides provided herein. In some embodiments, treatment comprises reducing CD274 expression. In some embodiments, the subject is treated therapeutically. In some embodiments, the subject is treated prophylactically.

[1189] In some embodiments of the methods herein, one or more oligonucleotides herein (e.g., RNAi oligonucleotides), or a pharmaceutical composition comprising one or more oligonucleotides, is administered to a subject having a disease, disorder or condition associated with CD274 expression such that CD274 expression is reduced in the subject, thereby treating the subject. In some embodiments, an amount or level of CD274 mRNA is reduced in the subject. In some embodiments, an amount or level of PD-L1 protein is reduced in the subject. In some embodiments, an amount or level of PD-L1 activity is reduced in the subject.

[1190] In some embodiments of the methods herein, an oligonucleotide provided herein (e.g., an RNAi oligonucleotide), or a pharmaceutical composition comprising the oligonucleotide, is administered to a subject having a disease, disorder or condition associated with CD274 such that CD274 expression is reduced in the subject by at least about 30%, about 35%, about 40%, about 45%, about 50%, about 55%, about 60%, about 65%, about 70%, about 75%, about 80%, about 85%, about 90%, about 95%, about 99% or greater than 99% when compared to CD274 expression prior to administration of one or more oligonucleotides or pharmaceutical composition. In some embodiments, CD274 expression is reduced in the subject by at least about 30%, about 35%, about 40%, about 45%, about 50%, about 55%, about 60%, about 65%, about 70%, about 75%, about 80%, about 85%, about 90%, about 95%, about 99% or greater than 99% when compared to CD274 expression in a subject (e.g., a reference or control subject) not receiving the oligonucleotide or oligonucleotides or pharmaceutical composition or receiving a control oligonucleotide or oligonucleotides, pharmaceutical composition or treatment.

[1191] In some embodiments of the methods herein, an oligonucleotide or oligonucleotides herein (e.g., RNAi oligonucleotides), or a pharmaceutical composition comprising the oligonucleotide or oligonucleotides, is administered to a subject having a disease, disorder or condition associated with CD274 expression such that an amount or level of CD274 mRNA is reduced in the subject by at least about 30%, about 35%, about 40%, about 45%, about 50%, about 55%, about 60%, about 65%, about 70%, about 75%, about 80%, about 85%, about 90%, about 95%, about 99% or greater than 99% when compared to the amount or level of CD274 mRNA prior to administration of the oligonucleotide or pharmaceutical composition. In some embodiments, an amount or level of CD274 mRNA is reduced in the subject by at least about 30%, about 35%, about 40%, about 45%, about 50%, about 55%, about 60%, about 65%, about 70%, about 75%, about 80%, about 85%, about 90%, about 95%, about 99% or greater than 99% when compared to an amount or level of CD274 mRNA in a subject (e.g., a reference or control subject) not receiving the oligonucleotide or oligonucleotides or pharmaceutical composition or receiving a control oligonucleotide or oligonucleotides, pharmaceutical composition or treatment.

[1192] In some embodiments of the methods herein, an oligonucleotide or oligonucleotides herein, or a pharmaceutical composition comprising the oligonucleotide or oligonucleotides, is administered to a subject having a disease, disorder or condition associated with CD274 expression such that an amount or level of PD-L1 protein is reduced in the subject by at least about 30%, about 35%, about 40%, about 45%, about 50%, about 55%, about 60%, about 65%, about 70%, about 75%, about 80%, about 85%, about 90%, about 95%, about 99% or greater than 99% when compared to the amount or level of PD-L1 protein prior to administration of the oligonucleotide or pharmaceutical composition. In some embodiments, an amount or level of PD-L1 protein is reduced in the subject by at least about 30%, about 35%, about 40%, about 45%, about 50%, about 55%, about 60%, about 65%, about 70%, about 75%, about 80%, about 85%, about 90%, about 95%, about 99% or greater than 99% when compared to an amount or level of PD-L1 protein in a subject (e.g., a reference or control subject) not receiving the oligonucleotide or oligonucleotides or pharmaceutical composition or receiving a control oligonucleotide, oligonucleotides or pharmaceutical composition or treatment.

[1193] In some embodiments of the methods herein, an oligonucleotide or oligonucleotides (e.g., RNAi oligonucleotides) herein, or a pharmaceutical composition comprising the oligonucleotide or oligonucleotides, is administered to a subject having a disease, disorder or condition associated with CD274 such that an amount or level of CD274 gene activity/expression is reduced in the subject by at least about 30%, about 35%, about 40%, about 45%, about 50%, about 55%, about 60%, about 65%, about 70%, about 75%, about 80%, about 85%, about 90%, about 95%, about 99% or greater than 99% when compared to the amount or level of CD274 activity prior to administration of the oligonucleotide or pharmaceutical composition. In some embodiments, an amount or level of CD274 activity is reduced in the subject by at least about 30%, about 35%, about 40%, about 45%, about 50%, about 55%, about 60%, about 65%, about 70%, about 75%, about 80%, about 85%, about 90%, about 95%, about 99% or greater than 99% when compared to an amount or level of CD274 activity in a subject (e.g., a reference or control subject) not receiving the oligonucleotide or pharmaceutical composition or receiving a control oligonucleotide, pharmaceutical composition or treatment.

[1194] In some embodiments of the methods herein, an oligonucleotide provided herein (e.g., an RNAi oligonucleotide), or a pharmaceutical composition comprising the oligonucleotide, is administered to a subject having a disease, disorder or condition associated with CD274 such that CD274 expression is reduced in macrophages by at least about 30%, about 35%, about 40%, about 45%, about 50%, about 55%, about 60%, about 65%, about 70%, about 75%, about 80%, about 85%, about 90%, about 95%, about 99% or greater than 99% when compared to CD274 expression prior to administration of one or more oligonucleotides or pharmaceutical composition. In some embodiments, CD274 expression is reduced in macrophages by at least about 30%, about 35%, about 40%, about 45%, about 50%, about 55%, about 60%, about 65%, about 70%, about 75%, about 80%, about 85%, about 90%, about 95%, about 99% or greater than 99% when compared to CD274 expression in macrophages (e.g., a reference or control subject) not receiving the oligonucleotide or oligonucleotides or pharmaceutical composition or receiving a control oligonucleotide or oligonucleotides, pharmaceutical composition or treatment.

[1195] In some embodiments of the methods herein, an oligonucleotide provided herein (e.g., an RNAi oligonucleotide), or a pharmaceutical composition comprising the oligonucleotide, is administered to a subject having a disease, disorder or condition associated with CD274 such that CD274 expression is reduced in dendritic cells by at least about 30%, about 35%, about 40%, about 45%, about 50%, about 55%, about 60%, about 65%, about 70%, about 75%, about 80%, about 85%, about 90%, about 95%, about 99% or greater than 99% when compared to CD274 expression prior to administration of one or more oligonucleotides or pharmaceutical composition. In some embodiments, CD274 expression is reduced in dendritic cells by at least about 30%, about 35%, about 40%, about 45%, about 50%, about 55%, about 60%, about 65%, about 70%, about 75%, about 80%, about 85%, about 90%, about 95%, about 99% or greater than 99% when compared to CD274 expression in dendritic cells (e.g., a reference or control subject) not receiving the oligonucleotide or oligonucleotides or pharmaceutical composition or receiving a control oligonucleotide or oligonucleotides, pharmaceutical composition or treatment.

[1196] Suitable methods for determining CD274 expression, the amount or level of CD274 mRNA, PD-L1 protein, PD-L1 activity, or a biomarker related to or affected by modulation of CD274 expression (e.g., a plasma biomarker), in the subject, or in a sample from the subject, are known in the art. Further, the Examples set forth herein illustrate methods for determining CD274 expression.

[1197] In some embodiments, CD274 expression, the amount or level of CD274 mRNA, PD-L1 protein, PD-L1 activity, or a biomarker related to or affected by modulation of CD274 expression, or any combination thereof, is reduced in a cell (e.g., a hepatocyte), a population or a group of cells (e.g., an organoid), an organ, blood or a fraction thereof (e.g., plasma), a tissue, a sample (e.g., a biopsy sample), or any other appropriate biological material obtained or isolated from the subject. In some embodiments, CD274 expression, the amount or level of CD274 mRNA, PD-L1 protein, PD-L1 activity, or a biomarker related to or affected by modulation of CD274 expression, or any combination thereof, is reduced in more than one type of cell (e.g., a hepatocyte and one or more other type(s) of cell), more than one groups of cells, more than one organ (e.g., liver and one or more other organ(s)), more than one fraction of blood (e.g., plasma and one or more other blood fraction(s)), more than one type of tissue (e.g., liver tissue and one or more other type(s) of tissue), or more than one type of sample (e.g., a liver biopsy sample and one or more other type(s) of biopsy sample).

[1198] Because of their high specificity, the oligonucleotides provided herein (e.g., RNAi oligonucleotides) specifically target mRNA of target genes (e.g., CD274 mRNA) of cells and tissue(s), or organs(s). In preventing disease, the target gene may be one which is required for initiation or maintenance of the disease or which has been identified as being associated with a higher risk of contracting the disease. In treating disease, the oligonucleotide can be brought into contact with the cells, tissue(s), or organ(s) exhibiting or responsible for mediating the disease. For example, an oligonucleotide (e.g., an RNAi oligonucleotide) substantially identical to all or part of a wild-type (i.e., native) or mutated gene associated with a disorder or condition associated with CD274 expression may be brought into contact with or introduced into a cell or tissue type of interest such as a tumor cells or tumor tissue.

[1199] Examples of a disease, disorder or condition associated with CD274 expression include, but are not limited to cancer, hepatitis B virus (HBV) infection, hepatitis C virus (HCV) infection, and human immunodeficiency virus (HIV) infection.

[1200] In some embodiments, the target gene may be a target gene from any mammal, such as a human target. Any target gene may be silenced according to the method described herein.

[1201] Methods described herein typically involve administering to a subject an effective amount of an oligonucleotide herein (e.g., a RNAi oligonucleotide), that is, an amount that produces or generates a desirable therapeutic result. A therapeutically acceptable amount may be an amount that therapeutically treats a disease or disorder. The appropriate dosage for any one subject will depend on certain factors, including the subject's size, body surface area, age, the composition to be administered, the active ingredient(s) in the composition, time and route of administration, general health, and other drugs being administered concurrently.

[1202] In some embodiments, a subject is administered any one of the compositions herein (e.g., a composition comprising an RNAi oligonucleotide described herein) either enterally (e.g., orally, by gastric feeding tube, by duodenal feeding tube, via gastrostomy or rectally), parenterally (e.g., subcutaneous injection, intravenous injection or infusion, intra-arterial injection or infusion, intraosseous infusion, intramuscular injection, intracerebral injection, intracerebroventricular injection, intrathecal), topically (e.g., epicutaneous, inhalational, via eye drops, or through a mucous membrane), or by direct injection into a target organ. Typically, oligonucleotides herein are administered intravenously or subcutaneously.

[1203] In some embodiments, an oligonucleotide herein (e.g., an RNAi oligonucleotide), or a pharmaceutical composition comprising the oligonucleotide, is administered alone or in combination. In some embodiments, the oligonucleotides herein are administered in combination concurrently, sequentially (in any order), or intermittently. For example, two oligonucleotides may be co-administered concurrently. Alternatively, one oligonucleotide may be administered and followed any amount of time later (e.g., one hour, one day, one week or one month) by the administration of a second oligonucleotide.

[1204] In some embodiments, the subject to be treated is a human or non-human primate or other mammalian subject. Other exemplary subjects include domesticated animals such as dogs and cats; livestock such as horses, cattle, pigs, sheep, goats, and chickens; and animals such as mice, rats, guinea pigs, and hamsters.

### Kits

[1205] In some embodiments, the disclosure provides a kit comprising an oligonucleotide herein (e.g., an RNAi oligonucleotide), and instructions for use. In some embodiments, the kit comprises an oligonucleotide herein, and a package insert containing instructions for use of the kit and/or any component thereof. In some embodiments, the kit comprises, in a suitable container, an oligonucleotide herein, one or more controls, and various buffers, reagents, enzymes and other standard ingredients well known in the art. In some embodiments, the container comprises at least one vial, well, test tube, flask, bottle, syringe, or other container means, into which the oligonucleotide is placed, and in some instances, suitably aliquoted. In some embodiments where an additional component is provided, the kit contains additional containers into which this component is placed. The kits can also include a means for containing the oligonucleotide and any other reagent in close confinement for commercial sale. Such containers may include injection or blow-molded plastic containers into which the desired vials are retained. Containers and/or kits can include labeling with instructions for use and/or warnings.

[1206] In some embodiments, a kit comprises an oligonucleotide herein (e.g., an RNAi oligonucleotide), and a pharmaceutically acceptable carrier, or a pharmaceutical composition comprising the oligonucleotide and instructions for treating or delaying progression of a disease, disorder or condition associated with CD274 expression in a subject in need thereof.

### Definitions

[1207] As used herein, the term “antisense oligonucleotide” encompasses a nucleic acid-based molecule which has a sequence complementary to all or part of the target mRNA, in particular seed sequence thereby capable of forming a duplex with a mRNA. Thus, the term “antisense oligonucleotide”, as used herein, may be referred to as “complementary nucleic acid-based inhibitor”.

[1208] As used herein, “approximately” or “about,” as applied to one or more values of interest, refers to a value that is similar to a stated reference value. In certain embodiments, “about” refers to a range of values that fall within 25%, 20%, 19%, 18%, 17%, 16%, 15%, 14%, 13%, 12%, 11%, 10%, 9%, 8%, 7%, 6%, 5%, 4%, 3%, 2%, 1% or less in either direction (greater than or less than) of the stated reference value unless otherwise stated or otherwise evident from the context (except where such number would exceed 100% of a possible value).

[1209] As used herein, “administer,” “administering,” “administration” and the like refers to providing a substance (e.g., an oligonucleotide) to a subject in a manner that is pharmacologically useful (e.g., to treat a disease, disorder, or condition in the subject).

[1210] As used herein, “attenuate,” “attenuating,” “attenuation” and the like refers to reducing or effectively halting. As a non-limiting example, one or more of the treatments herein may reduce or effectively halt the progression of cancer in a subject. This attenuation may be exemplified by, for example, a decrease in one or more aspects (e.g., symptoms, tissue characteristics, and cellular, inflammatory, or immunological activity, etc.) of cancer, no detectable progression (worsening) of one or more aspects of cancer, or no detectable aspects of cancer in a subject when they might otherwise be expected. In some embodiments, one or more of the treatments herein may reduce or effectively halt hepatitis B virus (HBV) infection, hepatitis C virus (HCV) infection, or human immunodeficiency virus (HIV) infection. This attenuation may be exemplified by, for example, a decrease in one or more aspects (e.g., symptoms, tissue characteristics, and cellular, inflammatory, or immunological activity, etc.) of viral infection, no detectable progression (worsening) of one or more aspects of viral infection, or no detectable aspects of viral infection in a subject when they might otherwise be expected.

[1211] As used herein, “complementary” refers to a structural relationship between two nucleotides (e.g., on two opposing nucleic acids or on opposing regions of a single nucleic acid strand) that permits the two nucleotides to form base pairs with one another. For example, a purine nucleotide of one nucleic acid that is complementary to a pyrimidine nucleotide of an opposing nucleic acid may base pair together by forming hydrogen bonds with one another. In some embodiments, complementary nucleotides can base pair in the Watson-Crick manner or in any other manner that allows for the formation of stable duplexes. In some embodiments, two nucleic acids may have regions of multiple nucleotides that are complementary with each other to form regions of complementarity, as described herein.

[1212] As used herein, “deoxyribonucleotide” refers to a nucleotide having a hydrogen in place of a hydroxyl at the 2′ position of its pentose sugar when compared with a ribonucleotide. A modified deoxyribonucleotide is a deoxyribonucleotide having one or more modifications or substitutions of atoms other than at the 2′ position, including modifications or substitutions in or of the sugar, phosphate group or base.

[1213] As used herein, “double-stranded oligonucleotide” or “ds oligonucleotide” refers to an oligonucleotide that is substantially in a duplex form. In some embodiments, the complementary base-pairing of duplex region(s) of a double-stranded oligonucleotide is formed between antiparallel sequences of nucleotides of covalently separate nucleic acid strands. In some embodiments, complementary base-pairing of duplex region(s) of a double-stranded oligonucleotide is formed between antiparallel sequences of nucleotides of nucleic acid strands that are covalently linked. In some embodiments, complementary base-pairing of duplex region(s) of a double-stranded oligonucleotide is formed from single nucleic acid strand that is folded (e.g., via a hairpin) to provide complementary antiparallel sequences of nucleotides that base pair together. In some embodiments, a double-stranded oligonucleotide comprises two covalently separate nucleic acid strands that are fully duplexed with one another. However, in some embodiments, a double-stranded oligonucleotide comprises two covalently separate nucleic acid strands that are partially duplexed (e.g., having overhangs at one or both ends). In some embodiments, a double-stranded oligonucleotide comprises antiparallel sequence of nucleotides that are partially complementary, and thus, may have one or more mismatches, which may include internal mismatches or end mismatches.

[1214] As used herein, “duplex,” in reference to nucleic acids (e.g., oligonucleotides), refers to a structure formed through complementary base pairing of two antiparallel sequences of nucleotides.

[1215] As used herein, “excipient” refers to a non-therapeutic agent that may be included in a composition, for example, to provide or contribute to a desired consistency or stabilizing effect.

[1216] As used herein, the term “CD274” or “PD-L1” refers to cluster of differentiation 274 or programmed death-ligand 1. The CD274 gene encodes a type I transmembrane protein which interacts with the PD-1 receptor to inhibit T-cell activation.

[1217] As used herein, “labile linker” refers to a linker that can be cleaved (e.g., by acidic pH). A “fairly stable linker” refers to a linker that cannot be cleaved.

[1218] As used herein, “loop” refers to an unpaired region of a nucleic acid (e.g., oligonucleotide) that is flanked by two antiparallel regions of the nucleic acid that are sufficiently complementary to one another, such that under appropriate hybridization conditions (e.g., in a phosphate buffer, in a cell), the two antiparallel regions, which flank the unpaired region, hybridize to form a duplex (referred to as a “stem”).

[1219] As used herein, “modified internucleotide linkage” refers to an internucleotide linkage having one or more chemical modifications when compared with a reference internucleotide linkage comprising a phosphodiester bond. In some embodiments, a modified nucleotide is a non-naturally occurring linkage. Typically, a modified internucleotide linkage confers one or more desirable properties to a nucleic acid in which the modified internucleotide linkage is present. For example, a modified internucleotide linkage may improve thermal stability, resistance to degradation, nuclease resistance, solubility, bioavailability, bioactivity, reduced immunogenicity, etc.

[1220] As used herein, “modified nucleotide” refers to a nucleotide having one or more chemical modifications when compared with a corresponding reference nucleotide selected from: adenine ribonucleotide, guanine ribonucleotide, cytosine ribonucleotide, uracil ribonucleotide, adenine deoxyribonucleotide, guanine deoxyribonucleotide, cytosine deoxyribonucleotide and thymidine deoxyribonucleotide. In some embodiments, a modified nucleotide is a non-naturally occurring nucleotide. In some embodiments, a modified nucleotide has one or more chemical modification in its sugar, nucleobase and/or phosphate group. In some embodiments, a modified nucleotide has one or more chemical moieties conjugated to a corresponding reference nucleotide. Typically, a modified nucleotide confers one or more desirable properties to a nucleic acid in which the modified nucleotide is present. For example, a modified nucleotide may improve thermal stability, resistance to degradation, nuclease resistance, solubility, bioavailability, bioactivity, reduced immunogenicity, etc.

[1221] As used herein, “nicked tetraloop structure” refers to a structure of a RNAi oligonucleotide that is characterized by separate sense (passenger) and antisense (guide) strands, in which the sense strand has a region of complementarity with the antisense strand, and in which at least one of the strands, generally the sense strand, has a tetraloop configured to stabilize an adjacent stem region formed within the at least one strand.

[1222] As used herein, “oligonucleotide” refers to a short nucleic acid (e.g., less than about 100 nucleotides in length). An oligonucleotide may be single-stranded (ss) or ds. An oligonucleotide may or may not have duplex regions. As a set of non-limiting examples, an oligonucleotide may be, but is not limited to, a small interfering RNA (siRNA), microRNA (miRNA), short hairpin RNA (shRNA), dicer substrate interfering RNA (DsiRNA), antisense oligonucleotide, short siRNA or ss siRNA. In some embodiments, a double-stranded (dsRNA) is an RNAi oligonucleotide.

[1223] As used herein, “overhang” refers to terminal non-base pairing nucleotide(s) resulting from one strand or region extending beyond the terminus of a complementary strand with which the one strand or region forms a duplex. In some embodiments, an overhang comprises one or more unpaired nucleotides extending from a duplex region at the 5′ terminus or 3′ terminus of an oligonucleotide. In certain embodiments, the overhang is a 3′ or 5′ overhang on the antisense strand or sense strand of an oligonucleotide.

[1224] As used herein, “phosphate analog” refers to a chemical moiety that mimics the electrostatic and/or steric properties of a phosphate group. In some embodiments, the phosphate analog mimics the electrostatic and/or steric properties of a phosphate group in biologic systems. In some embodiments, a phosphate analog is positioned at the 5′ terminal nucleotide of an oligonucleotide in place of a 5′-phosphate, which is often susceptible to enzymatic removal. In some embodiments, a 5′ phosphate analog contains a phosphatase-resistant linkage. Examples of phosphate analogs include, but are not limited to, 5′ phosphonates, such as 5′ methylene phosphonate (5′-MP) and 5′-(E)-vinylphosphonate (5′-VP). In some embodiments, an oligonucleotide has a phosphate analog at a 4′-carbon position of the sugar (referred to as a “4′-phosphate analog”) at a 5′-terminal nucleotide. An example of a 4′-phosphate analog is oxymethyl phosphonate, in which the oxygen atom of the oxymethyl group is bound to the sugar moiety (e.g., at its 4′-carbon) or analog thereof. See, e.g., US Patent Publication No. 2019-0177729. Other modifications have been developed for the 5′ end of oligonucleotides (see, e.g., Intl. Patent Application No. WO 2011/133871; U.S. Pat. No. 8,927,513; and Prakash et al. (2015) NUCLEIC ACIDS RES. 43:2993-3011).

[1225] As used herein, “reduced expression” of a gene (e.g., CD274) refers to a decrease in the amount or level of RNA transcript (e.g., CD274 mRNA) or protein encoded by the gene and/or a decrease in the amount or level of activity of the gene in a cell, a population of cells, a sample, or a subject, when compared to an appropriate reference (e.g., a reference cell, population of cells, sample or subject). For example, the act of contacting a cell with an oligonucleotide herein (e.g., an oligonucleotide comprising an antisense strand having a nucleotide sequence that is complementary to a nucleotide sequence comprising CD274 mRNA) may result in a decrease in the amount or level of CD274 mRNA, PD-L1 protein and/or activity (e.g., via degradation of CD274 mRNA by the RNAi pathway) when compared to a cell that is not treated with the oligonucleotide. Similarly, and as used herein, “reducing expression” refers to an act that results in reduced expression of a gene (e.g., CD274).

[1226] As used herein, “reduction of CD274 expression” refers to a decrease in the amount or level of CD274 mRNA, PD-L1 protein, PD-L1 activity in a cell, a population of cells, a sample or a subject when compared to an appropriate reference (e.g., a reference cell, population of cells, sample, or subject).

[1227] As used herein, “region of complementarity” refers to a sequence of nucleotides of a nucleic acid (e.g., an oligonucleotide) that is sufficiently complementary to an antiparallel sequence of nucleotides to permit hybridization between the two sequences of nucleotides under appropriate hybridization conditions (e.g., in a phosphate buffer, in a cell, etc.). In some embodiments, an oligonucleotide herein comprises a targeting sequence having a region of complementary to a mRNA target sequence.

[1228] As used herein, “ribonucleotide” refers to a nucleotide having a ribose as its pentose sugar, which contains a hydroxyl group at its 2′ position. A modified ribonucleotide is a ribonucleotide having one or more modifications or substitutions of atoms other than at the 2′ position, including modifications or substitutions in or of the ribose, phosphate group or base.

[1229] As used herein, “RNAi oligonucleotide” refers to either (a) a double-stranded oligonucleotide having a sense strand (passenger) and antisense strand (guide), in which the antisense strand or part of the antisense strand is used by the Argonaute 2 (Ago2) endonuclease in the cleavage of a target mRNA (e.g., CD274 mRNA) or (b) a single-stranded oligonucleotide having a single antisense strand, where that antisense strand (or part of that antisense strand) is used by the Ago2 endonuclease in the cleavage of a target mRNA (e.g., CD274 mRNA).

[1230] As used herein, “strand” refers to a single, contiguous sequence of nucleotides linked together through internucleotide linkages (e.g., phosphodiester linkages or phosphorothioate linkages). In some embodiments, a strand has two free ends (e.g., a 5′ end and a 3′ end).

[1231] As used herein, “subject” means any mammal, including mice, rabbits, and humans. In one embodiment, the subject is a human or NHP. Moreover, “individual” or “patient” may be used interchangeably with “subject.”

[1232] As used herein, “synthetic” refers to a nucleic acid or other molecule that is artificially synthesized (e.g., using a machine (e.g., a solid-state nucleic acid synthesizer)) or that is otherwise not derived from a natural source (e.g., a cell or organism) that normally produces the molecule.

[1233] As used herein, “targeting ligand” refers to a molecule (e.g., a carbohydrate, amino sugar, cholesterol, polypeptide, or lipid) that selectively binds to a cognate molecule (e.g., a receptor) of a tissue or cell of interest and that is conjugatable to another substance for purposes of targeting the other substance to the tissue or cell of interest. For example, in some embodiments, a targeting ligand may be conjugated to an oligonucleotide for purposes of targeting the oligonucleotide to a specific tissue or cell of interest. In some embodiments, a targeting ligand selectively binds to a cell surface receptor. Accordingly, in some embodiments, a targeting ligand when conjugated to an oligonucleotide facilitates delivery of the oligonucleotide into a particular cell through selective binding to a receptor expressed on the surface of the cell and endosomal internalization by the cell of the complex comprising the oligonucleotide, targeting ligand and receptor. In some embodiments, a targeting ligand is conjugated to an oligonucleotide via a linker that is cleaved following or during cellular internalization such that the oligonucleotide is released from the targeting ligand in the cell.

[1234] As used herein, “tetraloop” refers to a loop that increases stability of an adjacent duplex formed by hybridization of flanking sequences of nucleotides. The increase in stability is detectable as an increase in melting temperature (Tₘ) of an adjacent stem duplex that is higher than the Tₘ of the adjacent stem duplex expected, on average, from a set of loops of comparable length consisting of randomly selected sequences of nucleotides. For example, a tetraloop can confer a Tₘ of at least about 50° C., at least about 55° C., at least about 56° C., at least about 58° C., at least about 60° C., at least about 65° C. or at least about 75° C. in 10 mM Na₂HPO₄ to a hairpin comprising a duplex of at least 2 base pairs (bp) in length. In some embodiments, a tetraloop can confer a Tm of at least about 50° C., at least about 55° C., at least about 56° C., at least about 58° C., at least about 60° C., at least about 65° C. or at least about 75° C. in 10 mM NaH₂PO₄ to a hairpin comprising a duplex of at least 2 base pairs (bp) in length. In some embodiments, a tetraloop may stabilize a bp in an adjacent stem duplex by stacking interactions. In addition, interactions among the nucleotides in a tetraloop include, but are not limited to, non-Watson-Crick base pairing, stacking interactions, hydrogen bonding and contact interactions (Cheong et al. (1990) NATURE 346:680-82; Heus & Pardi (1991) SCIENCE 253:191-94). In some embodiments, a tetraloop comprises or consists of 3 to 6 nucleotides and is typically 4 to 5 nucleotides. In certain embodiments, a tetraloop comprises or consists of 3, 4, 5 or 6 nucleotides, which may or may not be modified (e.g., which may or may not be conjugated to a targeting moiety). In one embodiment, a tetraloop consists of 4 nucleotides. Any nucleotide may be used in the tetraloop and standard IUPAC-IUB symbols for such nucleotides may be used as described in Cornish-Bowden (1985) NUCLEIC ACIDS RES. 13:3021-30. For example, the letter “N” may be used to mean that any base may be in that position, the letter “R” may be used to show that A (adenine) or G (guanine) may be in that position, and “B” may be used to show that C (cytosine), G (guanine), or T (thymine) may be in that position. Examples of tetraloops include the UNCG family of tetraloops (e.g., UUCG), the GNRA family of tetraloops (e.g., GAAA), and the CUUG tetraloop (Woese et al. (1990) PROC. NATL. ACAD. SCI. USA 87:8467-71; Antao et al. (1991) NUCLEIC ACIDS RES. 19:5901-05). Examples of DNA tetraloops include the d(GNNA) family of tetraloops (e.g., d(GTTA), the d(GNRA)) family of tetraloops, the d(GNAB) family of tetraloops, the d(CNNG) family of tetraloops, and the d(TNCG) family of tetraloops (e.g., d(TTCG)). See, e.g., Nakano et al. (2002) BIOCHEM. 41:14281-92; Shinji et al. (2000) NIPPON KAGAKKAI KOEN YOKOSHU 78:731. In some embodiments, the tetraloop is contained within a nicked tetraloop structure.

[1235] As used herein, “treat” or “treating” refers to the act of providing care to a subject in need thereof, for example, by administering a therapeutic agent (e.g., an oligonucleotide herein) to the subject, for purposes of improving the health and/or well-being of the subject with respect to an existing condition (e.g., a disease, disorder) or to prevent or decrease the likelihood of the occurrence of a condition. In some embodiments, treatment involves reducing the frequency or severity of at least one sign, symptom or contributing factor of a condition (e.g., disease, disorder) experienced by a subject.

### OTHER EMBODIMENTS

E1. An oligonucleotide for reducing CD274 expression, the oligonucleotide comprising an antisense strand of 15 to 30 nucleotides in length and a sense strand of 15 to 40 nucleotides in length, wherein the sense strand and antisense strand form a duplex region, wherein the antisense strand has a region of complementarity to a target sequence of CD274 as set forth in any one of SEQ ID NOs: 1-2 and 4-241.
E2. The oligonucleotide of embodiment E1, wherein the region of complementarity is fully complementary to the target sequence of CD274.
E3. The oligonucleotide of any one of embodiments E1 or E2, wherein the antisense strand is 19 to 27 nucleotides in length.
E4. The oligonucleotide of any one of embodiments E1 to E3, wherein the antisense strand is 21 to 27 nucleotides in length, optionally wherein the antisense strand is 22 nucleotides in length.
E5. The oligonucleotide of embodiment E1 wherein the sense strand is 19 to 40 nucleotides in length, optionally wherein the sense strand is 36 nucleotides in length.
E6. The oligonucleotide of any one of embodiments E1-E5, wherein the duplex region is at least 19 nucleotides in length.
E7. The oligonucleotide of any one of embodiments E1-E6, wherein the duplex region is at least 20 nucleotides in length, optionally wherein the duplex region is 21 nucleotides in length.
E8. The oligonucleotide of any one of embodiments E1-E7, wherein the region of complementarity is at least 19 contiguous nucleotides in length.
E9. The oligonucleotide of any one of embodiments E1-E8, wherein the region of complementarity is at least 21 contiguous nucleotides in length.
E10. The oligonucleotide of any one of embodiments E1-E9, wherein the antisense strand comprises a sequence as set forth in any one of SEQ ID NOs: 242-243 and 245-482.
E11. The oligonucleotide of any one of embodiments E1-E10, wherein the sense strand comprises a sequence as set forth in any one of SEQ ID NOs: 1-2 and 4-241.
E12. The oligonucleotide of any one of embodiments E1 to E11, wherein the sense strand comprises at its 3′ end a stem-loop set forth as: S1-L-S2, wherein S1 is complementary to S2, and wherein L forms a loop between S1 and S2 of 3 to 5 nucleotides in length.
E13. An oligonucleotide for reducing CD274 expression, the oligonucleotide comprising an antisense strand and a sense strand, wherein the antisense strand is 21 to 27 nucleotides in length and has a region of complementarity to a target sequence of CD274 as set forth in any one of SEQ ID NOs: 1-2 and 4-241, wherein the sense strand comprises at its 3′ end a stem-loop set forth as: S1-L-S2, wherein S1 is complementary to S2, and wherein L forms a loop between S1 and S2 of 3 to 5 nucleotides in length, and wherein the antisense strand and the sense strand form a duplex region of at least 19 nucleotides in length.
E14. The oligonucleotide of embodiment E13, wherein the region of complementarity is at least 19 nucleotides in length and is fully complementary to the target sequence.
E15. The oligonucleotide of any one of embodiments E12-E14, wherein L is a tetraloop.
E16. The oligonucleotide of any one of embodiments E12-E15, wherein L is 4 nucleotides in length.
E17. The oligonucleotide of any one of embodiments E12-E16, wherein L comprises a sequence set forth as GAAA.
E18. The oligonucleotide of any one of embodiments E1-E17, wherein (i) the antisense strand is 27 nucleotides in length and the sense strand is 25 nucleotides in length, or (ii) the antisense strand is 22 nucleotides in length and the sense strand is 36 nucleotides in length.
E19. The oligonucleotide of embodiment E18, wherein the antisense strand and sense strand form a duplex region of 25 nucleotides in length or 20 nucleotides in length.
E20. The oligonucleotide of any one of embodiments E1-E19, wherein the antisense strand comprises a 3′ overhang sequence of one or more nucleotides in length, optionally wherein the 3′ overhang sequence is 2 nucleotides in length, optionally wherein the 3′ overhang sequence is GG.
E21. The oligonucleotide of any one of the preceding embodiments, wherein the oligonucleotide comprises at least one modified nucleotide.
E22. The oligonucleotide of embodiment E21, wherein the modified nucleotide comprises a 2′-modification.
E23. The oligonucleotide of embodiment E22, wherein the 2′-modification is a modification selected from 2′-aminoethyl, 2′-fluoro, 2′-O-methyl, 2′-O-methoxyethyl, and 2′-deoxy-2′-fluoro-β-d-arabinonucleic acid.
E24. The oligonucleotide of any one of embodiments E20-E23, wherein about 10-15%, 10%, 11%, 12%, 13%, 14% or 15% of the nucleotides of the sense strand comprise a 2′-fluoro modification.
E25. The oligonucleotide of any one of embodiments E20-E24, wherein about 25-35%, 25%, 26%, 27%, 28%, 29%, 30%, 31%, 32%, 33%, 34% or 35% of the nucleotides of the antisense strand comprise a 2′-fluoro modification.
E26. The oligonucleotide of any one of embodiments E20-E25, wherein about 25-35%, 25%, 26%, 27%, 28%, 29%, 30%, 31%, 32%, 33%, 34% or 35% of the nucleotides of the oligonucleotide comprise a 2′-fluoro modification.
E27. The oligonucleotide of any one of embodiments E20-E26, wherein the sense strand comprises 36 nucleotides with positions 1-36 from 5′ to 3′, wherein positions 8-11 comprise a 2′-fluoro modification.
E28. The oligonucleotide of any one of embodiments E20-E27, wherein the antisense strand comprises 22 nucleotides with positions 1-22 from 3′ to 5′, and wherein positions 2, 3, 4, 5, 7, 10 and 14 comprise a 2′-fluoro modification.
E29. The oligonucleotide of any one of embodiments E23-E28, wherein the remaining nucleotides comprise a 2′-O-methyl modification.
E30. The oligonucleotide of embodiment E27, wherein positions 1-7, 12-27 and 31-36 of the sense strand comprise a 2′-O-methyl modification.
E31. The oligonucleotide of embodiment E28 or E30, wherein positions 1, 6, 8, 9, 11-13 and 15-22 of the antisense strand comprise a 2′-O-methyl modification.
E32. The oligonucleotide of any one of embodiments E20-E31, wherein all of the nucleotides of the oligonucleotide are modified.
E33. The oligonucleotide of any one of the preceding embodiments, wherein the oligonucleotide comprises at least one modified internucleotide linkage.
E34. The oligonucleotide of embodiment E33, wherein the at least one modified internucleotide linkage is a phosphorothioate linkage.
E35. The oligonucleotide of embodiment E34, wherein the sense strand comprises a phosphorothioate linkage between positions 1 and 2 of the sense strand.
E36. The oligonucleotide of embodiment E34, wherein the sense strand comprises a phosphorothioate linkage between positions 1 and 2, 2 and 3, and 3 and 4 of the sense strand.
E37. The oligonucleotide of any one of embodiments E34-E36, wherein the antisense strand comprises 22 nucleotides with positions 1-22 from 3′ to 5′, wherein the antisense strand comprises a phosphorothioate linkage between positions 1 and 2, 2 and 3, 20 and 21, and 21 and 22.
E38. The oligonucleotide of any one of the preceding embodiments, wherein the 4′-carbon of the sugar of the 5′-nucleotide of the antisense strand comprises a phosphate analog.
E39. The oligonucleotide of embodiment E38, wherein the phosphate analog is oxymethyl phosphonate, vinyl phosphonate or malonyl phosphonate.
E40. The oligonucleotide of any one of the preceding embodiments, wherein at least one nucleotide of the oligonucleotide is conjugated to one or more targeting ligands.
E41. The oligonucleotide of embodiment E40, wherein the nucleotide is conjugated to more than one targeting ligands, wherein the targeting ligands are the same or are different.
E42. The oligonucleotide of embodiment E40 or E41, wherein the one or more targeting ligands is selected from carbohydrate, amino sugar, cholesterol, polypeptide, or lipid.
E43. The oligonucleotide of E40 or E41, wherein the targeting ligand comprises a N-acetylgalactosamine (GalNAc) moiety.
E44. The oligonucleotide of embodiment E43, wherein the GalNAc moiety is a monovalent GalNAc moiety, a bivalent GalNAc moiety, a trivalent GalNAc moiety or a tetravalent GalNAc moiety.
E45. The oligonucleotide of any one of embodiments E12-E44, wherein up to 4 nucleotides of L of the stem-loop are each conjugated to a monovalent GalNAc moiety.
E46. The oligonucleotide of any one of embodiments E1-E45, wherein the sense strand and antisense strand comprise nucleotide sequences selected from the group consisting of:
[1236] (a) SEQ ID NOs: 483 and 724, respectively;
[1237] (b) SEQ ID NOs: 484 and 725, respectively;
[1238] (c) SEQ ID NOs: 486 and 727, respectively;
[1239] (d) SEQ ID NOs: 487 and 728, respectively;
[1240] (e) SEQ ID NOs: 488 and 729, respectively;
[1241] (f) SEQ ID NOs: 489 and 730, respectively;
[1242] (g) SEQ ID NOs: 490 and 731, respectively;
[1243] (h) SEQ ID NOs: 492 and 733, respectively;
[1244] (i) SEQ ID NOs: 493 and 734, respectively;
[1245] (j) SEQ ID NOs: 494 and 735, respectively;
[1246] (k) SEQ ID NOs: 495 and 736, respectively;
[1247] (l) SEQ ID NOs: 496 and 737, respectively;
[1248] (m) SEQ ID NOs: 497 and 738, respectively;
[1249] (n) SEQ ID NOs: 498 and 739, respectively;
[1250] (o) SEQ ID NOs: 499 and 740, respectively;
[1251] (p) SEQ ID NOs: 500 and 741, respectively;
[1252] (q) SEQ ID NOs: 501 and 742, respectively;
[1253] (r) SEQ ID NOs: 502 and 743, respectively;
[1254] (s) SEQ ID NOs: 503 and 744, respectively;
[1255] (t) SEQ ID NOs: 504 and 745, respectively;
[1256] (u) SEQ ID NOs: 505 and 746, respectively;
[1257] (v) SEQ ID NOs: 506 and 747, respectively;
[1258] (w) SEQ ID NOs: 507 and 748, respectively;
[1259] (x) SEQ ID NOs: 508 and 749, respectively;
[1260] (y) SEQ ID NOs: 509 and 750, respectively;
[1261] (z) SEQ ID NOs: 510 and 751, respectively;
[1262] (aa) SEQ ID NOs: 511 and 752, respectively;
[1263] (bb) SEQ ID NOs: 512 and 753, respectively;
[1264] (cc) SEQ ID NOs: 513 and 754, respectively;
[1265] (dd) SEQ ID NOs: 514 and 755, respectively;
[1266] (ee) SEQ ID NOs: 515 and 756, respectively;
[1267] (ff) SEQ ID NOs: 516 and 757, respectively;
[1268] (gg) SEQ ID NOs: 517 and 758, respectively;
[1269] (hh) SEQ ID NOs: 518 and 758, respectively; and,
[1270] (ii) SEQ ID NOs: 491 and 732, respectively.
   E47. The oligonucleotide of any one of embodiments E1-E45, wherein the sense strand comprises the nucleotide sequence of SEQ ID NO: 484 and the antisense strand comprises the nucleotides sequence of SEQ ID NO: 725.
   E48. The oligonucleotide of any one of embodiments E1-E45, wherein the sense strand comprises the nucleotide sequence of SEQ ID NO: 486 and the antisense strand comprises the nucleotides sequence of SEQ ID NO: 727.
   E49. The oligonucleotide of any one of embodiments E1-E45, wherein the sense strand comprises the nucleotide sequence of SEQ ID NO: 487 and the antisense strand comprises the nucleotides sequence of SEQ ID NO: 728.
   E50. The oligonucleotide of any one of embodiments E1-E45, wherein the sense strand comprises the nucleotide sequence of SEQ ID NO: 488 and the antisense strand comprises the nucleotides sequence of SEQ ID NO: 729.
   E51. The oligonucleotide of any one of embodiments E1-E45, wherein the sense strand comprises the nucleotide sequence of SEQ ID NO: 489 and the antisense strand comprises the nucleotides sequence of SEQ ID NO: 730.
   E52. The oligonucleotide of any one of embodiments E1-E45, wherein the sense strand comprises the nucleotide sequence of SEQ ID NO: 491 and the antisense strand comprises the nucleotides sequence of SEQ ID NO: 732.
   E53. The oligonucleotide of any one of embodiments E1-E45, wherein the sense strand comprises the nucleotide sequence of SEQ ID NO: 502 and the antisense strand comprises the nucleotides sequence of SEQ ID NO: 743.
   E54. The oligonucleotide of any one of embodiments E1-E45, wherein the sense strand comprises a nucleotide sequence of any one of SEQ ID NOs: 965-1000.
   E55. The oligonucleotide of any one of embodiments E1-E45, wherein the antisense strand comprises a nucleotide sequence of any one of SEQ ID NOs: 1001-1036.
   E56. The oligonucleotide of any one of embodiments E1-E45, wherein the sense strand and antisense strand comprise nucleotide sequences selected from the consisting of:
[1271] (a) SEQ ID NOs: 965 and 1001, respectively;
[1272] (b) SEQ ID NOs: 966 and 1002, respectively;
[1273] (c) SEQ ID NOs: 968 and 1004, respectively;
[1274] (d) SEQ ID NOs: 969 and 1005, respectively;
[1275] (e) SEQ ID NOs: 970 and 1006, respectively;
[1276] (f) SEQ ID NOs: 971 and 1007, respectively;
[1277] (g) SEQ ID NOs: 972 and 1008, respectively;
[1278] (h) SEQ ID NOs: 974 and 1010, respectively;
[1279] (i) SEQ ID NOs: 975 and 1011, respectively;
[1280] (j) SEQ ID NOs: 976 and 1012, respectively;
[1281] (k) SEQ ID NOs: 977 and 1013, respectively;
[1282] (l) SEQ ID NOs: 978 and 1014, respectively;
[1283] (m) SEQ ID NOs: 979 and 1015, respectively;
[1284] (n) SEQ ID NOs: 980 and 1016, respectively;
[1285] (o) SEQ ID NOs: 981 and 1017, respectively;
[1286] (p) SEQ ID NOs: 982 and 1018, respectively;
[1287] (q) SEQ ID NOs: 983 and 1019, respectively;
[1288] (r) SEQ ID NOs: 984 and 1020, respectively;
[1289] (s) SEQ ID NOs: 985 and 1021, respectively;
[1290] (t) SEQ ID NOs: 986 and 1022, respectively;
[1291] (u) SEQ ID NOs: 987 and 1023, respectively;
[1292] (v) SEQ ID NOs: 988 and 1024, respectively;
[1293] (w) SEQ ID NOs: 989 and 1025, respectively;
[1294] (x) SEQ ID NOs: 990 and 1026, respectively;
[1295] (y) SEQ ID NOs: 991 and 1027, respectively;
[1296] (z) SEQ ID NOs: 992 and 1028, respectively;
[1297] (aa) SEQ ID NOs: 993 and 1029, respectively;
[1298] (bb) SEQ ID NOs: 994 and 1030, respectively;
[1299] (cc) SEQ ID NOs: 995 and 1031, respectively;
[1300] (dd) SEQ ID NOs: 996 and 1032, respectively;
[1301] (ee) SEQ ID NOs: 997 and 1033, respectively;
[1302] (ff) SEQ ID NOs: 998 and 1034, respectively;
[1303] (gg) SEQ ID NOs: 999 and 1035, respectively;
[1304] (hh) SEQ ID NOs: 1000 and 1036, respectively; and,
[1305] (ii) SEQ ID NOs: 973 and 1009, respectively.
   E57. The oligonucleotide of any one of embodiments E1-E45, wherein the sense strand comprises the nucleotide sequence of SEQ ID NO: 966 and the antisense strand comprises the nucleotides sequence of SEQ ID NO: 1002.
   E58. The oligonucleotide of any one of embodiments E1-E45, wherein the sense strand comprises the nucleotide sequence of SEQ ID NO: 968 and the antisense strand comprises the nucleotides sequence of SEQ ID NO: 1004.
   E59. The oligonucleotide of any one of embodiments E1-E45, wherein the sense strand comprises the nucleotide sequence of SEQ ID NO: 969 and the antisense strand comprises the nucleotides sequence of SEQ ID NO: 1005.
   E60. The oligonucleotide of any one of embodiments E1-E45, wherein the sense strand comprises the nucleotide sequence of SEQ ID NO: 970 and the antisense strand comprises the nucleotides sequence of SEQ ID NO: 1006.
   E61. The oligonucleotide of any one of embodiments E1-E45, wherein the sense strand comprises the nucleotide sequence of SEQ ID NO: 971 and the antisense strand comprises the nucleotides sequence of SEQ ID NO: 1007.
   E62. The oligonucleotide of any one of embodiments E1-E45, wherein the sense strand comprises the nucleotide sequence of SEQ ID NO: 973 and the antisense strand comprises the nucleotides sequence of SEQ ID NO: 1009.
   E63. The oligonucleotide of any one of embodiments E1-E45, wherein the sense strand comprises the nucleotide sequence of SEQ ID NO: 984 and the antisense strand comprises the nucleotides sequence of SEQ ID NO: 1020.
   E64. A pharmaceutical composition comprising the oligonucleotide of any one of embodiments E1-E63, and a pharmaceutically acceptable carrier, delivery agent or excipient.
   E65. A method of treating cancer in a subject, the method comprising administering to the subject an effective amount of the oligonucleotide of any one of embodiments E1-E63 or the pharmaceutical composition of embodiment E64.
   E66. A method of treating a disease, disorder or condition associated with activated CD274 expression, comprising administering to a subject in need thereof the oligonucleotide of any one of embodiments E1-E63 or the pharmaceutical composition of embodiment E64.
   E67. A method of treating cancer in a subject, the method comprising administering to the subject an effective amount of the oligonucleotide of any one of embodiments E1-E63 or the pharmaceutical composition of embodiment E64, in combination with a CTLA4 inhibitor.
   E68. A method of treating a treating a disease, disorder or condition associated with activated CD274 expression, comprising administering to a subject in need thereof the oligonucleotide of any one of embodiments E1-E63 or the pharmaceutical composition of embodiment E64, in combination with a CTLA4 inhibitor.
   E69. The method of embodiment E66 or E68, wherein the disease, disorder, or condition associated with activated CD274 expression is a cancer.
   E70. The method of any one of embodiments E65, E66, and E69, wherein the cancer is selected from carcinoma, sarcoma, melanoma, lymphoma, and leukemia, prostate cancer, breast cancer, hepatocellular carcinoma (HCC), colorectal cancer, pancreatic cancer and glioblastoma.
   E71. The method of any one of embodiments E65, E66, and E69-E70, wherein the cancer comprises an immunosuppressive tumor microenvironment.
   E72. The method of any one of embodiments E65, E66, and E69-E71, wherein the cancer comprises an inflamed tumor microenvironment.
   E73. The method of embodiment E72, wherein the inflamed tumor microenvironment comprises infiltrating T cells.
   E74. The method of any one of embodiments E67-E73, wherein the CTLA-4 inhibitor is an antibody.
   E75. The method of embodiment E74, wherein the antibody is an anti-CTLA-4 antibody.
   E76. The method of embodiment E75, wherein the anti-CTLA-4 antibody is selected from Ipilimumab and Tremelimumab.
   E77. Use of the oligonucleotide of any one of embodiments E1-E63, or the pharmaceutical composition of embodiment E64, in the manufacture of a medicament for the treatment of a disease, disorder, or condition associated with CD274 expression, optionally for the treatment of cancer.
   E78. The oligonucleotide of any one of embodiments E1-E63, or the pharmaceutical composition of embodiment E64, for use, or adaptable for use, in the treatment of a disease, disorder or condition associated with CD274 expression, optionally for the treatment of cancer.
   E79. A kit comprising the oligonucleotide of any one of embodiments E1-E63, an optional pharmaceutically acceptable carrier, and a package insert comprising instructions for administration to a subject having a disease, disorder or condition associated with CD274 expression.
   E80. The use of embodiment E77, the oligonucleotide or pharmaceutical composition for use, or adaptable for use, of embodiment E78, or the kit of embodiment E79, wherein the disease, disorder or condition associated with CD274 expression is cancer.
   E81. Use of the oligonucleotide of any one of embodiments E1-E63, or the pharmaceutical composition of embodiment E64, in the manufacture of a medicament for the treatment of a disease, disorder, or condition associated with CD274 expression, in combination with a CTLA4 inhibitor.
   E82. The oligonucleotide of any one of embodiments E1-E63, or the pharmaceutical composition of embodiment E64, for use, or adaptable for use, in the treatment of a disease, disorder or condition associated with CD274 expression, in combination with a CTLA4 inhibitor.
   E83. A kit comprising the oligonucleotide of any one of embodiments E1-E63, an optional pharmaceutically acceptable carrier, and a package insert comprising instructions for administration of the RNAi oligonucleotide in combination with a CTLA4 inhibitor to a subject having a disease, disorder or condition associated with CD274 expression.
   E84. The use of embodiment E81, the oligonucleotide or pharmaceutical composition for use, or adaptable for use, of embodiment E82, or the kit of embodiment E83, wherein the disease, disorder or condition associated with CD274 expression is cancer.

### EXAMPLES

### Example 1: Preparation of Double-Stranded RNAi Oligonucleotides

### General Synthetic Methods

[1306] The following examples are intended to illustrate the disclosure and are not to be construed as being limitations thereon. Temperatures are given in degrees centigrade (C). If not mentioned otherwise, all evaporations are performed under reduced pressure, preferably between about 15 mm Hg and 100 mm Hg (=20-133 mbar). The structure of final products, intermediates and starting materials was confirmed by standard analytical methods, e.g., microanalysis and spectroscopic characteristics, e.g., MS, IR, NMR. Abbreviations used are those conventional in the art.

[1307] All starting materials, building blocks, reagents, acids, bases, dehydrating agents, solvents, and catalysts utilized to synthesis the nucleic acid or analogues thereof of the present disclosure are either commercially available or can be produced by organic synthesis methods known to one of ordinary skill in the art (METHODS OF ORGANIC SYNTHESIS, Thieme, Volume 21 (Houben-Weyl 4th Ed. 1952)). Further, the nucleic acid or analogues thereof of the present disclosure can be produced by organic synthesis methods known to one of ordinary skill in the art as shown in the following examples.

[1308] All reactions are carried out under nitrogen or argon unless otherwise stated.

[1309] Proton NMR (¹H NMR) was conducted in deuterated solvent. In certain nucleic acid or analogues thereof disclosed herein, one or more ¹H shifts overlap with residual proteo solvent signals; these signals have not been reported in the experimental provided hereinafter.

[1310] As depicted in the Examples below, in certain exemplary embodiments, the nucleic acid or analogues thereof were prepared according to the following general procedures. It will be appreciated that, although the general methods depict the synthesis of certain nucleic acid or analogues thereof of the present disclosure, the following general methods, and other methods known to one of ordinary skill in the art, can be applied to all nucleic acid or analogues thereof and subclasses and species of each of these nucleic acid or analogues thereof, as described herein.

### Example 1a: Synthesis of 2-(2-((((6aR,8R,9R,9aR)-8-(6-benzamido-9H-purin-9-yl)-2,2,4,4-tetraisopropyltetrahydro-6H-furo[3,2-f][1,3,5,2,4]trioxadisilocin-9-yl)oxy)methoxy)ethoxy) ethan-1-ammonium formate (1-6)

[chemical structure]

[1311] A solution of compound 1-1 (25.00 g, 67.38 mmol) in 20 mL of DMF was treated with pyridine (11 mL, 134.67 mmol) and tetraisopropyldisiloxane dichloride (22.63 mL, 70.75 mmol) at 10° C. The resulting mixture was stirred at 25° C. for 3 h and quenched with 20% citric acid (50 mL). The aqueous layer was extracted with EtOAc (3×50 mL) and the combined organic layers were concentrated in vacuo. The crude residue was recrystallized from a mixture of MTBE and n-heptane (1:15, 320 mL) to afford compound 1-2 (37.20 g, 90%) as a white oily solid.

[1312] A solution of compound 1-2 (37.00 g, 60.33 mmol) in 20 mL of DMSO was treated with AcOH (20 mL, 317.20 mmol) and Ac₂O (15 mL, 156.68 mmol). The mixture was stirred at 25° C. for 15 h. The reaction was diluted with EtOAc (100 mL) and quenched with sat. K₂CO₃ (50 mL). The aqueous layer was extracted with EtOAc (3×50 mL). The combined organic layers were concentrated and recrystallized with ACN (30 mL) to afford compound 1-3 (15.65 g, 38.4%) as a white solid.

[1313] A solution of compound 1-3 (20.00 g, 29.72 mmol) in 120 mL of DCM was treated with Fmoc-amino-ethoxy ethanol (11.67 g, 35.66 mmol) at 25° C. The mixture was stirred to afford a clear solution and then treated with 4 Å molecular sieves (20.0 g), N-iodosuccinimide (8.02 g, 35.66 mmol), and TfOH (5.25 mL, 59.44 mmol). The mixture was stirred at 30° C. until the HPLC analysis indicated >95% consumption of compound 1-3. The reaction was quenched with TEA (6 mL) and filtered. The filtrate was diluted with EtOAc, washed with sat. NaHCO₃ (2×100 mL), sat. Na₂SO₃ (2×100 mL), and water (2×100 mL) and concentrated in vacuo to afford crude compound 1-4 (26.34 g, 93.9%) as a yellow solid, which was used directly for the next step without further purification.

[1314] A solution of compound 1-4 (26.34 g, 27.62 mmol) in a mixture of DCM/water (10:7, 170 mL) was treated with DBU (7.00 mL, 45.08 mmol) at 5° C. The mixture was stirred at 5-25° C. for 1 h. The organic layer was then separated, washed with water (100 mL), and diluted with DCM (130 mL). The solution was treated with fumaric acid (7.05 g, 60.76 mmol) and 4 Å molecular sieves (26.34 g) in four portions. The mixture was stirred for 1 h, concentrated, and recrystallized from a mixture of MTBE and DCM (5:1) to afford compound 1-6 (14.74 g, 62.9%) as a white solid: ¹H NMR (400 MHz, d₆-DMSO) 8.73 (s, 1H), 8.58 (s, 1H), 8.15-8.02 (m, 2H), 7.65-7.60 (m, 1H), 7.59-7.51 (m, 2H), 6.52 (s, 2H), 6.15 (s, 1H), 5.08-4.90 (m, 3H), 4.83-4.78 (m, 1H), 4.15-3.90 (m, 3H), 3.79-3.65 (m, 2H), 2.98-2.85 (m, 6H), 1.20-0.95 (m, 28H).

### Example 1b: Synthesis of (2R,3R,4R,5R)-5-(6-benzamido-9H-purin-9-yl)-2-((bis(4-methoxyphenyl)(phenyl)methoxy)methyl)-4-((2-(2-[lipid]-amidoethoxy)ethoxy)methoxy) tetrahydrofuran-3-yl (2-cyanoethyl) diisopropylphosphoramidite (2-4a to 2-4e)

[chemical structure]

[1315] A solution of compound 1-6 (50.00 g, 59.01 mmol) in 150 mL of 2-methyltetrahydrofuran was washed with ice cold aqueous K₂HPO₄ (6%, 100 mL) and brine (20%, 2×100 mL). The organic layer was separated and treated with hexanoic acid (10.33 mL, 82.61 mmol), HATU (33.66 g, 88.52 mmol), and DMAP (10.81 g, 147.52 mmol) at 0° C. The resulting mixture was warmed to 25° C. and stirred for 1 h. The solution was washed with water (2×100 mL), brine (100 mL), and concentrated in vacuo to afford a crude residue. Flash chromatography on silica gel (1:1 hexanes/acetone) gave compound 2-1a (34.95 g, 71.5%) as a white solid.

[1316] A mixture of compound 2-1a (34.95 g, 42.19 mmol) and TEA (9.28 mL, 126.58 mmol) in 80 mL of THF was treated with triethylamine trihydrofluoride (20.61 mL, 126.58 mmol) dropwise at 10° C. The mixture was warmed to 25° C. and stirred for 2 h. The reaction was concentrated, dissolved in DCM (100 mL), and washed with sat. NaHCO₃ (5×20 mL) and brine (50 mL). The organic layer was concentrated in vacuo to afford crude compound 2-2a (24.72 g, 99%), which was used directly for the next step without further purification.

[1317] A solution of compound 2-2a (24.72 g, 42.18 mmol) in 50 mL of DCM was treated with N-methylmorpholine (18.54 mL, 168.67 mmol) and DMTr-Cl (15.69 g, 46.38 mmol). The mixture was stirred at 25° C. for 2 h and quenched with sat. NaHCO₃ (50 mL). The organic layer was separated, washed with water, concentrated to afford a slurry crude. Flash chromatography on silica gel (1:1 hexanes/acetone) gave compound 2-3a (30.05 g, 33.8 mmol, 79.9%) as a white solid.

[1318] A solution of compound 2-3a (25.00 g, 28.17 mmol) in 50 mL of DCM was treated with N-methylmorpholine (3.10 mL, 28.17 mmol) and tetrazole (0.67 mL, 14.09 mmol) under nitrogen atmosphere. Bis(diisopropylamino) chlorophosphine (9.02 g, 33.80 mmol) was added to the solution dropwise and the resulting mixture was stirred at 25° C. for 4 h. The reaction was quenched with water (15 mL), and the aqueous layer was extracted with DCM (3×50 mL). The combined organic layers were washed with sat. NaHCO₃ (50 mL), concentrated to afford a crude solid that was recrystallized from a mixture of DCM/MTBE/n-hexane (1:4:40) to afford compound 2-4a (25.52 g, 83.4%) as a white solid: ¹H NMR (400 MHz, d₆-DMSO) 11.25 (s, 1H), 8.65-8.60 (m, 2H), 8.09-8.02 (m, 2H), 7.71 (s, 1H), 7.67-7.60 (m, 1H), 7.59-7.51 (m, 2H), 7.38-7.34 (m, 2H), 7.30-7.25 (m, 7H), 6.85-6.79 (m, 4H), 6.23-6.20 (m, 1H), 5.23-5.14 (m, 1H), 4.80-4.69 (m, 3H), 4.33-4.23 (m, 2H), 3.90-3.78 (m, 1H), 3.75 (s, 6H), 3.74-3.52 (m, 3H), 3.50-3.20 (m, 6H), 3.14-3.09 (m, 2H), 3.09 (s, 1H), 2.82-2.80 (m, 1H), 2.65-2.60 (m, 1H), 2.05-1.96 (m, 2H), 1.50-1.39 (m, 2H), 1.31-1.10 (m, 14H), 1.08-1.05 (m, 2H), 0.85-0.79 (m, 3H); ³¹P NMR (162 MHz, d₆-DMSO) 149.43, 149.18.

[1319] Compound 2-4b, 2-4c, 2-4d, and 2-4e were prepared using similar procedures described above for compound 2-4a. Compound 2-4b was obtained (25.50 g, 85.4%) as a white solid: ¹H NMR (400 MHz, d₆-DMSO) 11.23 (s, 1H), 8.65-8.60 (m, 2H), 8.05-8.02 (m, 2H), 7.73-7.70 (m, 1H), 7.67-7.60 (m, 1H), 7.59-7.51 (m, 2H), 7.38-7.34 (m, 2H), 7.30-7.25 (m, 7H), 6.89-6.80 (m, 4H), 6.21-6.15 (m, 1H), 5.23-5.17 (m, 1H), 4.80-4.69 (m, 3H), 4.40-4.21 (m, 2H), 3.91-3.80 (m, 1H), 3.74 (s, 6H), 3.74-3.52 (m, 3H), 3.50-3.20 (m, 6H), 3.14-3.09 (m, 2H), 3.09 (s, 1H), 2.83-2.79 (m, 1H), 2.68-2.62 (m, 1H), 2.05-1.97 (m, 2H), 1.50-1.38 (m, 2H), 1.31-1.10 (m, 18H), 1.08-1.05 (m, 2H), 0.85-0.78 (m, 3H); ³¹P NMR (162 MHz, d₆-DMSO) 149.43, 149.19.

[1320] Compound 2-4c was obtained (36.60 g, 66.3%) as an off-white solid: ¹H NMR (400 MHz, d₆-DMSO) 11.22 (s, 1H), 8.64-8.59 (m, 2H), 8.05-8.00 (m, 2H), 7.73-7.70 (m, 1H), 7.67-7.60 (m, 1H), 7.59-7.51 (m, 2H), 7.38-7.34 (m, 2H), 7.30-7.25 (m, 7H), 6.89-6.80 (m, 4H), 6.21-6.15 (m, 1H), 5.25-5.17 (m, 1H), 4.80-4.69 (m, 3H), 4.40-4.21 (m, 2H), 3.91-3.80 (m, 1H), 3.74 (s, 6H), 3.74-3.50 (m, 3H), 3.50-3.20 (m, 6H), 3.14-3.09 (m, 2H), 3.09 (s, 1H), 2.83-2.79 (m, 1H), 2.68-2.62 (m, 1H), 2.05-1.99 (m, 2H), 1.50-1.38 (m, 2H), 1.33-1.12 (m, 38H), 1.08-1.05 (m, 2H), 0.86-0.80 (m, 3H); ³¹P NMR (162 MHz, d₆-DMSO) 149.42, 149.17.

[1321] Compound 2-4d was obtained (26.60 g, 72.9%) as an off-white solid: ¹H NMR (400 MHz, d₆-DMSO) 11.22 (s, 1H), 8.64-8.59 (m, 2H), 8.05-8.00 (m, 2H), 7.73-7.70 (m, 1H), 7.67-7.60 (m, 1H), 7.59-7.51 (m, 2H), 7.38-7.33 (m, 2H), 7.30-7.25 (m, 7H), 6.89-6.80 (m, 4H), 6.21-6.15 (m, 1H), 5.22-5.17 (m, 1H), 4.80-4.69 (m, 3H), 4.40-4.21 (m, 2H), 3.91-3.80 (m, 1H), 3.74 (s, 6H), 3.74-3.52 (m, 3H), 3.50-3.20 (m, 6H), 3.14-3.09 (m, 2H), 3.09 (s, 1H), 2.83-2.79 (m, 1H), 2.68-2.62 (m, 1H), 2.05-1.99 (m, 2H), 1.50-1.38 (m, 2H), 1.35-1.08 (m, 38H), 1.08-1.05 (m, 2H), 0.85-0.79 (m, 3H); ³¹P NMR (162 MHz, d₆-DMSO) 149.47, 149.22.

[1322] Compound 2-4e was obtained (38.10 g, 54.0%) as a white solid: ¹H NMR (400 MHz, d₆-DMSO) 11.21 (s, 1H), 8.64-8.59 (m, 2H), 8.05-8.00 (m, 2H), 7.73-7.70 (m, 1H), 7.67-7.60 (m, 1H), 7.59-7.51 (m, 2H), 7.38-7.34 (m, 2H), 7.30-7.25 (m, 7H), 6.89-6.80 (m, 4H), 6.21-6.15 (m, 1H), 5.23-5.17 (m, 1H), 4.80-4.69 (m, 3H), 4.40-4.21 (m, 2H), 3.91-3.80 (m, 1H), 3.73 (s, 6H), 3.74-3.52 (m, 3H), 3.47-3.22 (m, 6H), 3.14-3.09 (m, 2H), 3.09 (s, 1H), 2.83-2.79 (m, 1H), 2.68-2.62 (m, 1H), 2.05-1.99 (m, 2H), 1.50-1.38 (m, 2H), 1.35-1.06 (m, 46H), 1.08-1.06 (m, 2H), 0.85-0.77 (m, 3H); ³¹P NMR (162 MHz, d₆-DMSO) 149.41, 149.15.

### Example 2. Synthesis of GalXC RNAi Oligonucleotide-Lipid Conjugates

[1323] Scheme 1. Synthesis of GalXC RNAi oligonucleotide-lipid conjugates with mono-lipid (linear and branched) conjugated to the tetraloop. Post-synthetic conjugation was realized through amide coupling reactions.

[chemical structure]

[1324] R₁COOH group represents fatty acid C8:0, C10:0, C11:0, C12:0, C14:0, C16:0, C17:0, C18:0, C18:1, C18:2, C22:5, C22:0, C24:0, C26:0, C22:6, C24:1, diacyl C16:0 or diacyl C18:1

[chemical structure]

[1325] Synthesis Sense 1 and Antisense 1 were prepared by solid-phase synthesis.

Synthesis of Conjugated Sense 1a-1i.

[1326] Conjugated Sense 1a was synthesized through post-syntenic conjugation approach. In Eppendorf tube 1, a solution of octanoic acid (0.58 mg, 4 umol) in DMA (0.75 mL) was treated with HATU (1.52 mg, 4 umol) at rt. In Eppendorf tube 2, a solution of oligo Sense 1 (10.00 mg, 0.8 umol) in H₂O (0.25 mL) was treated with DIPEA (1.39 uL, 8 umol). The solution in Eppendorf tube 1 was added to the Eppendorf tube 2 and mixed using Thermomixer at rt. After the reaction was completed indicated by LC-MS analysis, the reaction mixture was diluted with 5 mL of water and purified by revers phase XBridge C18 column using a 5-95% gradient of 100 mM TEAA in ACN and H₂O. The product fractions were concentrated under reduced pressure using Genevac. The combined residual solvent was dialyzed against water (1×), saline (1×), and water (3×) using Amicon® Ultra-15 Centrifugal (3K). The Amicon membrane was washed with water (3×2 mL) and the combined solvents were then lyophilized to afford an amorphous white solid of Conjugated Sense 1a (6.43 mg, 64% yield).

[1327] Conjugated Sense 1b-1i were prepared using similar procedures as described for the synthesis of Conjugated Sense 1a and obtained in 42%-69% yields.

Annealing of Duplex 1a-1j.

[1328] Conjugated Sense 1a (10 mg, measured by weight) was dissolved in 0.5 mL deionized water to prepare a 20 mg/mL solution. Antisense 1 (10 mg, measured by OD) was dissolved in 0.5 mL deionized water to prepare a 20 mg/mL solution, which was used for the titration of the conjugated sense and quantification of the duplex amount. Based on the calculation of molar amounts of both conjugated sense and antisense, a proportion of required Antisense 1 was added to the Conjugated Sense 1a solution. The resulting mixture was stirred at 95° C. for 5 min and allowed to cool down to rt. The annealing progress was monitored by ion-exchange HPLC. Based on the annealing progress, several proportions of Antisense 1 were further added to complete the annealing with >95% purity. The solution was lyophilized to afford Duplex 1a (C8) and its amount was calculated based on the molar amount of the antisense consumed in the annealing.

[1329] Duplex 1b-1i were prepared using the same procedures as described for the annealing of Duplex 1a (C8).

[1330] The following Scheme 1-2 depicts the synthesis of Nicked tetraloop GalXC conjugates with mono-lipid on the loop. Post-synthetic conjugation was realized through Cu-catalyzed alkyne-azide cycloaddition reaction.

[chemical structure]

[1331] Sense 1B and Antisense 1B were prepared by solid-phase synthesis.

### Synthesis of Conjugated Sense 1j.

[1332] In Eppendorf tube 1, a solution of oligo (10.00 mg, 0.8 umol) in a 3:1 mixture of DMA/H₂O (0.5 mL) was treated with the lipid linker azide (11.26 mg, 4 umol). In Eppendorf tube 2, CuBr dimethyl sulfide (1.64 mg, 8 umol) was dissolved in ACN (0.5 mL). Both solutions were degassed for 10 min by bubbling N₂ through them. The ACN solution of CuBrSMe₂ was then added into tube 1 and the resulting mixture was stirred at 40° C. After the reaction was completed indicated by LC-MS analysis, the reaction mixture was diluted with 0.5 M EDTA (2 mL) and dialyzed against water (2×) using a Amicon® Ultra-15 Centrifugal (3K). The reaction crude was purified by revers phase XBridge C18 column using a 5-95% gradient of 100 mM TEAA in ACN (with 30% IPA spiked in) and H₂O. The product fractions were concentrated under reduced pressure using Genevac. The combined residual solvent was dialyzed against water (1×), saline (1×), and water (3×) using Amicon® Ultra-15 Centrifugal (3K). The Amicon membrane was washed with water (3×2 mL) and the combined solvents were lyophilized to afford an amorphous white solid of Conjugated Sense 1j (6.90 mg, 57% yield).

[1333] Duplex 1j (PEG2K-diacyl C18) was prepared using the same procedures as described for the annealing of Duplex 1a (C8).

[1334] The following Scheme 1-3 depicts the synthesis of Nicked tetraloop GalXC conjugates with di-lipid on the loop using post-synthetic conjugation approach.

[chemical structure]

[chemical structure]

[1335] Sense 2 and Antisense 2 were prepared by solid-phase synthesis.

[1336] Conjugated Sense 2a and 2b were prepared using similar procedures as described for the synthesis of Conjugated Sense 1a but with 10 eq of lipid, 10 eq of HATU, and 20 eq of DIPEA.

[1337] Duplex 2a (2XC11) and 2b (2XC22) were prepared using the same procedures as described for the annealing of Duplex 1a (C8).

[1338] The following Scheme 1-4 depicts the synthesis of GalXC of fully phosphorothioated stem-loop conjugated with mono-lipid using post-synthetic conjugation approach.

[chemical structure]

[1339] Sense 3 and Antisense 3 were prepared by solid-phase synthesis.

[1340] Conjugated Sense 3a was prepared using similar procedures as described for the synthesis of Conjugated Sense 1a and obtained in a 65% yield.

[1341] Duplex 3a (PS-C22) was prepared using the same procedures as described for the annealing of Duplex 1a (C8).

[1342] The following Scheme 1-5 depicts the synthesis of GalXC of short sense conjugated with mono-lipid using post-synthetic conjugation approach.

[chemical structure]

[1343] Sense 4 and Antisense 4 were prepared by solid-phase synthesis.

[1344] Conjugated Sense 4a was prepared using similar procedures as described for the synthesis of Conjugated Sense 1a and obtained in a 74% yield.

[1345] Duplex 4a (SS-C22) was prepared using the same procedures as described for the annealing of Duplex 1a (C8).

[1346] The following Scheme 1-6 depicts the synthesis of Nicked tetraloop GalXC conjugated with tri-adamantane moiety on the loop using post-synthetic conjugation approach.

[chemical structure]

[1347] Sense 5 and Antisense 5 were prepared by solid-phase synthesis.

[1348] Conjugated Sense 5a and 5b were prepared using similar procedures as described for the synthesis of Conjugated Sense 1a and obtained in 42%-73% yields.

[1349] Duplex 5a (3×adamantane) and Duplex 5b (3×acetyladamantane) were prepared using the same procedures as described for the annealing of Duplex 1a (C8).

[1350] The following scheme 1-7 depicts an example of solid phase synthesis of Nicked tetraloop GalXC conjugated with lipid(s) on the loop.

[chemical structure]

### Synthesis of Conjugated Sense 6.

[1351] Conjugated Sense 6 was prepared by solid-phase synthesis using a commercial oligo synthesizer. The oligonucleotides were synthesized using 2′-modified nucleoside phosphoramidites, such as 2′-F or 2′-OMe, and 2′-diethoxymethanol linked fatty acid amide nucleoside phosphoramidites. Oligonucleotide synthesis was conducted on a solid support in the 3′ to 5′direction using a standard oligonucleotide synthesis protocol. In these efforts, 5-ethylthio-1H-tetrazole (ETT) was used as an activator for the coupling reaction. Iodine solution was used for phosphite triester oxidation. 3-(Dimethylaminomethylidene)amino-3H-1,2,4-dithiazole-3-thione (DDTT) was used for the formation of phosphorothioate linkages. Synthesized oligonucleotides were treated with concentrated aqueous ammonium for 10 h. The ammonia was removed from the suspension and the solid support residues were removed by filtration. The crude oligonucleotide was treated with TEAA, analyzed, and purified by strong anion exchange high performance liquid chromatography (SAX-HPLC). The fractions were combined and dialyzed against water (3×), saline (1×), and water (3×) using Amicon® Ultra-15 Centrifugal (3K). The remaining solvent was then lyophilized to afford the desired Conjugated Sense 6.

[1352] Duplex 6 was prepared using the same procedures as described for the annealing of Duplex 1a (C8).

[1353] Scheme 8. Synthesis of Nicked tetraloop GalXC conjugated with one adamantane unit on the loop via a post-synthetic conjugation approach.

[chemical structure]

### Synthesis of Conjugated Sense 7a and 7b

[1354] Conjugated Sense 7a and Sense 7b were obtained using the same method or a substantially similar method to the synthesis of Conjugated Sense 5.

### Synthesis Example of Duplex 7a and 7b

[1355] Duplex 7a and Duplex 7b were obtained using the same method or a substantially similar method to the synthesis of Duplex 5.

[1356] Scheme 9. Synthesis of nicked tetraloop GalXC conjugated with two adamantane units on the loop via a post-synthetic conjugation approach.

[chemical structure]

### Synthesis of Conjugated Sense 8a and 8b

[1357] Conjugated Sense 8a and Sense 8b were obtained using the same method or a substantially similar method to the synthesis of Conjugated Sense 5.

### Synthesis Example of Duplex 8a and 8b

[1358] Duplex 8a and Duplex 8b were obtained using the same method or a substantially similar method to the synthesis of Duplex 5.

[1359] The following Scheme1-10 depicts the synthesis of GalXC of short sense and short stem loop conjugated with mono-lipid using post-synthetic conjugation approach.

[chemical structure]

### Synthesis of Sense 9a

[1360] Conjugated Sense 9a was obtained using the same method or a substantially similar method to the synthesis of Conjugated Sense 5.

### Synthesis Example of Duplex 9a

[1361] Duplex 9a was obtained using the same method or a substantially similar method to the synthesis of Duplex 5.

[1362] The following Scheme1-11 depicts the synthesis of GalXC conjugated with mono-lipid at 5′-end using post-synthetic conjugation approach.

[chemical structure]

[chemical structure]

### Synthesis of Conjugated Sense 10a

[1363] Conjugated Sense 10a was obtained using the same method or a substantially similar method to the synthesis of Conjugated Sense 5.

### Synthesis Example of Duplex 10a

[1364] Duplex 10a was obtained using the same method or a substantially similar method to the synthesis of Duplex 5.

[1365] The following Scheme1-12a and 1-12b depict the synthesis of GalXC with blunt end conjugated with mono-lipid at 3′-end or 5′-end using post-synthetic conjugation approach.

[chemical structure]

[chemical structure]

[chemical structure]

### Synthesis of Conjugated Sense 11a and 12a

[1366] Conjugated Sense 11a and 12a were obtained using the same method or a substantially similar method to the synthesis of Conjugated Sense 5.

### Synthesis Example of Duplex 11a and 12a

[1367] Duplex 11a and 12a were obtained using the same method or a substantially similar method to the synthesis of Duplex 5.

[1368] Conjugates Duplex 8D and Duplex 9D were obtained using the same method or a substantially similar method to the synthesis of Duplex 5.

### Example 3: In Vivo Tumor Models

[1369] Programmed death-ligand 1, or CD274 is an immune inhibitory receptor ligand expressed by cells to prevent immune cells from attaching nonharmful cells in the body while targeting foreign cells such as cancer cells or infectious cells. Tumor models were generated to evaluate the anti-tumor efficacy of lipid-conjugated oligonucleotides targeting CD274. Briefly, 6-8-week-old immunocompromised (Nude) or immunocompetent (C57BL/6 or Balbc) mice were injected subcutaneously with 4-5×10⁶ Pan02 cells (mouse pancreatic cancer cell line with matrigel), 2×10⁶ 4T1 cells (mouse triple negative breast), 5×10⁶ MC-38 cells (mouse colon), 2×10⁶ Hepa1-6 cells (hepatocellular carcinoma) under the right shoulder. When the tumors reached a volume of 300-500 mm³, mice were randomized into different cohorts and subjected to dosing with lipid conjugates (generated using the methods described in Examples 1 and 2). Each lipid conjugate was dosed subcutaneously at a total volume of 10 mL/kg. The mouse pancreatic cell line Pan02 was obtained from NCI; mouse breast, colon, and hepatocellular carcinoma cell lines (4T1, MC-38, and Hepa1-6 cell lines, respectively) were obtained from ATCC (Manassas, VA). All cells were grown in RPMI/DMEM medium supplemented with 10% FBS. Pan02 and 4T1 tumors are known to maintain very suppressive, or cold, tumor microenvironments whereas MC-38 and Hepa1-6 are known to be partially sensitive or sensitive to checkpoint inhibitors

### Example 4: Determining Delivery of Lipid Conjugates to Different Components of the Tumor Microenvironment

[1370] To elucidate delivery of oligonucleotide lipid conjugates, Pan02, 4T1, Hepa 1-6, and MC-38 cells were implanted in C57BL/6, Balb/c, and C57BL/6 mice, respectively as described in Example 3. At about two weeks post implant, when tumor volume reached ˜300-400 mm³, mice were randomized into 2 groups (n=3-4) and treated with either Phosphate Buffered Saline (PBS) or a C18 lipid-conjugated oligonucleotide targeting mouse Cd274 referred to as GalXC-mCD274-C18 (depicted in FIG. 1A with corresponding unmodified sense and antisense sequences of SEQ ID NOs: 1041 and 1042, respectively) at 25 mg/kg. The modification pattern of which is illustrated below:

Sense Strand:
5′ mX-S-mX-mX-mX-mX-mX-mX-fX-fX-fX-fX[-mX-]₁₇-
[ademX-L]-[mX]₈ 3′.

### Hybridized to:

Antisense Strand:
5′ [MePhosphonate-4O-mX]-S-fX-S-fX-fX-fX-mX-fX-
mX-mX-fX-mX-mX-mX-fX-mX-mX-mX-mX-mX-mX-S-mX-S-mX
3′.

Or, represented as:

Sense Strand:
[mXs][mX][mX][mX][mX][mX][mX][fX][fX][fX][fX][mX]
[mX][mX][mX][mX][mX][mX][mX][mX][mX][mX][mX][mX]
[mX][mX][mX][ademX-C18][mX][mX][mX][mX][mX][mX]
[mX][mX]

### Hybridized to:

Antisense Strand:
[MePhosphonate-4O-mXs][fXs][fX][fX][fX][mX][fX][mX]
[mX][fX][mX][mX][mX][fX][mX][mX][mX][mX][mX][mXs]
[mXs][mX]

(Modification key: Table 1).

| | |
|---|---|
| Symbol | Modification/linkage |

Key 1

| | |
|---|---|
| mX | 2′-O-methyl modified nucleotide |
| fX | 2′-fluoro modified nucleotide |
| —S— | phosphorothioate linkage |
| — | phosphodiester linkage |
| [MePhosphonate-4O-mX] | 5′-methoxyphosphonate-4′-oxy modified nucleotide |
| ademA-GalNAc | GalNAc attached to an adenine nucleotide |
| ademX-L | Lipid molecule (e.g., C18) attached to a nucleotide |

Key 2

| | |
|---|---|
| [mXs] | 2′-O-methyl modified nucleotide with a phosphorothioate |
| | linkage to the neighboring nucleotide |
| [fXs] | 2′-fluoro modified nucleotide with a phosphorothioate linkage |
| | to the neighboring nucleotide |
| [mX] | 2′-O-methyl modified nucleotide with phosphodiester linkages |
| | to neighboring nucleotides |
| [fX] | 2′-fluoro modified nucleotide with phosphodiester linkages to |
| | neighboring nucleotides |

[1371] Mice were dosed subcutaneously once every three days (q3dx2; i.e., on Day 1 and Day 4). Seven days post the last subcutaneous injection, tumors and tumor draining lymph nodes (TDLN) were collected and analyzed by qPCR to determine mRNA levels of mouse Cd274. As shown in FIGS. 2A-2G, the mouse Cd274 mRNA levels were decreased by -40-50% in both Tumor microenvironment (TME) and Tumor draining lymph nodes (TDLN) of all 3 tumor types treated with GalXC-mCD274-C18 lipid conjugate. These data suggest that the GalXC-mCD274-C18 lipid conjugate mediates similar oligonucleotide delivery to components in tumor microenvironment and TDLN to facilitate target knockdown independent of the tumor type.

[1372] As Cd11c expressing cells in TDLN are known to be the major antigen presenting cells and the PD-L1 expressed by these cells is identified to play key role in antigen presentation machinery and mediating immune responses, first the delivery to these cells with lipid conjugates was evaluated. To do that, myeloid cell types present in the TDLN (Cd11c and Cd11b) were isolated and evaluated after treating the tumor mice with GalXC-ALDH2, a surrogate conjugate as ALDH2 is a protein ubiquitously expressed in the body. Pan02 cells were implanted in C57BL/6 mice as described in Example 3 and when the tumors reached the size of 300-400 mm³, mice (n=3/group) were treated with PBS or GalXC-ALDH2 (modified sense strand of SEQ ID NO: 1045 and modified antisense strand of SEQ ID NO: 1046) at 25 mg/kg. Three days post injection, both inguinal and axillary lymph nodes from 3 mice were pooled in one tube for isolation process. Single cell suspensions were made from pooled lymph nodes and were processed through Gentle MACs system to isolate the Cd11b and Cd11c enriched cell populations. To confirm knockdown in specific cell types such as Cd11b and Cd11c in TDLN, RNA was isolated from these enriched fractions and analyzed by qPCR for mRNA levels of mouse Aldh2. As demonstrated in FIG. 3, the target knockdown was about 70% in Cd11b cells and slightly higher in Cd11c cells. This suggests that the GalXC-ALDH2 conjugate efficiently delivers the payload to the major antigen presenting cells (Cd11c) in TDLN.

[1373] As the PD-L1, especially intracellular format expressed by these Cd11c⁺ DCs cells are identified to play a key role in initiating antigen presentation and mediating immune responses in resistant tumor phenotypes, it was investigated if GalXC-CD274 could silence the intracellular Cd274 in CD11c+DCs present in TDLN of resistant tumor type. To verify this observation with a GalXC-mCD274-C18 conjugate, another resistant tumor 4T1 was utilized. Tumors were grown as described in Example 3 and mice were sorted into 3 groups (n=3) and treated subcutaneously with either GalXC-Placebo-C18 or GalXC-mCD274-C18 at 25 mg/kg or intraperitoneally with an anti-PDL1 mAb (Clone #10G.9G2; Cat #BP0101) at 10 mg/kg. Mice were administered 2 doses of the oligonucleotide on Day 1 and 4 (q3dx2) (FIG. 4A). Seven days post last dose, TDLNs were collected (both inguinal and axillary in one cassette) and processed for immunohistochemistry and sections were stained for Cd11c and PD-L1. As demonstrated in FIG. 4B, the Cd11c levels were fairly similar in tumors from all 3 treatment groups. PD-L1 levels aligned with Cd11c levels in samples that had GalXC-Placebo-C18 or mAb treatment. However, the PD-L1 levels were significantly reduced in samples that had GalXC-mCD274-C18 treatment suggesting that GalXC-mCD274-C18 efficiently silenced the intracellular PD-L1 expressed by Cd11c cells in lymph nodes.

[1374] Anti-PD-L1 mAb typically acts to unleash the break between extracellular PD-1 and PD-L1 engagement, thus it is possible that mAb treatment may not reduce protein levels. However, one would expect to see immune activation in TDLN once the Cd274 gene is silenced by RNAi or the PD-1/PD-L1 bond is unleashed by mAb treatment. To evaluate immune activation in TDLN after silencing of Cd274 using RNAi or a mAb, lymph nodes collected from another similar study d were processed and analyzed for mRNA levels of Ifng and Gzmb. As shown in FIGS. 5A-5B, the activation markers were increased in TDLN that had GalXC-mCD274-C18 treatment but not the ones that had anti-PD-L1 mAb treatment suggesting that GalXC-mCD274-C18 mediated silencing of PD-L1 and enhances the antigen presentation machinery and priming of T-cells in a resistant tumor type whereas the anti-PD-L1 mAb was unable to increase T-cell activation. In contrast, when the same process was repeated in an inflamed phenotype, MC-38 tumor model, in which the antigen presentation, T-cell priming, and T-cell trafficking to TME happens fairly well, the activation markers increased to same extent by both anti-PD-L1 mAb and GalXC-mCD274-C18 (FIG. 5C). This indicates that the inhibition of PD-L1 on host or both host and tumor cells mediate similar immune responses in tumor types with intact immunity. However, RNAi-PDL1 mediated functions could be differentiated from mAb in resistant tumor phenotypes where anti-tumor immunity is suboptimal or dampened. Thus, RNAi-PDL1 mediated intracellular Cd274 silencing seems critical for rejuvenating antigen presentation to initiate T-cell activation.

[1375] To see if the activated T-cells migrate into TME, the T-cell marker was measured using immunohistochemistry analysis of CD8 expression in 4T1 (checkpoint inhibitor resistant) and MC-38 (checkpoint inhibitor sensitive) tumors. Tumors from mice treated as described above were prepared for CD8 immunohistochemical analysis. Upon treatment with the anti-PD-L1 antibody or GalXC-mCD274-C18 RNAi oligonucleotide, similar increase in CD8 positive stain, indicating similar T-cell infiltration was observed in the checkpoint inhibitor sensitive tumors (FIG. 6). However, T-cell infiltration only increased in the checkpoint resistant tumors upon treatment with GalXC-mCD274-C18 (FIG. 7).

[1376] The data collectively demonstrate that both molecules act similarly in sensitive tumors but the CD274 targeting lipid-conjugated oligonucleotide mediated functions could be differentiated from mAb mainly in resistant tumor phenotypes as mAb might not have access to the other formats of PD-L1, especially the intracellular PD-L1 that is known to be in involved in mediating resistance whereas a CD274 targeting lipid-conjugated oligonucleotide could.

### Example 5: CD274 Inhibition Increases T-Cell Infiltration in TME and Mediates Acute Tumor Effects in Resistant Tumors

[1377] To evaluate if the infiltrated T-cells in the TME have any effect on tumor growth, studies were run in two resistant tumor models. In the first study, 4T1 tumor bearing Balb/c mice (n=5 per group) were treated subcutaneously with i) GalXC-placebo-C18; or ii) anti-PDL1 mAb; or, iii) GalXC-mCD274-C18. GalXC-mCD274-C18 and GalXC-Placebo-C18 were administered at a dose of 50 mg/kg, whereas the anti-PD-L1 mAb was administered at a dose of 10 mg/kg on days 10, 13, and 16 after tumor cell injection. Tumors treated with GalXC-mCD274-C18 demonstrated significant tumor growth inhibition whereas the tumors that had mAb or GalXC-Placebo-C18 treatment had no effect at all (FIG. 8A). Necrotic areas identified in tumors that had GalXC-mCD274-C18 treatment suggest tumor killing (data not shown). In a separate study, Pan02 tumor bearing mice were sorted and treated with the same agents at 25 mg/kg at q3dx2 per week for 2 weeks. Significant growth inhibition in tumors that had GalXC-mCD274-C18 treatment and not in tumors that had either mAb or GalXC-Placebo-C18 treatments confirming that the GalXC-mCD274-C18, by silencing PD-L1 in TME and TDLN a resistant phenotype enhance T-cell infiltration in TME to kill tumors (FIG. 8B).

### Example 6: CD274 Targeting Lipid-Conjugated Oligonucleotide Mediated Anti-Tumor Activity is CD8⁺ T-Cell Mediated

[1378] To evaluate if the anti-tumor efficacy observed with CD274 targeting lipid-conjugated oligonucleotide treatment is T-cell mediated, the same study was repeated in an immunodeficient mice (nude mice) which have no functional T-cells. 4T1 tumors were grown in nude mice and sorted and treated with i) GalXC-placebo-C18; or ii) anti-PDL1 mAb; or, iii) GalXC-mCD274-C18. GalXC-mCD274-C18 and GalXC-Placebo-C18 were administered at a dose of 50 mg/kg, whereas the anti-PD-L1 mAb was administered at a dose of 10 mg/kg on days 14, 17, and 20 as described in Example 5. No growth inhibition was observed in any of the groups suggesting that T-cells play a role in mediating tumor cell killing (FIG. 9A). For 4T1 tumors that were implanted in an immunocompetent mouse, tumor growth inhibition was significant after treatment with single agent GalXC-mCD274-C18 at 50 mg/kg as shown in FIGS. 8A and 10A. 4T1 tumors are known to spontaneously metastasize to lungs in about 3 weeks after the subcutaneous implantation, thus, in the same experiment that was run in Balb/c mice, lung tissue was collected to evaluate the presence of metastatic lesions. As shown in FIG. 10B, the lungs collected from GalXC-Placebo-C18 and mAb treatment groups had metastatic lesions whereas the lungs from GalXC-mCD274-C18 treatment group did not show any visual lesions in the lung. However, lungs collected from the study repeated in nude mice had metastatic lesions with all treatments suggesting that the GalXC-mCD274-C18 mediated anti-tumor activity requires activated T-cells (FIG. 9B). These studies also reveal that these activated T-cells generated in mice with intact immune system, beyond treating the primary tumors also limit the spontaneous metastasis to lung whereas the anti-PD-L1 mAb in the resistant tumor settings was unable to do any of the above.

### Example 7: CD274 Targeting Lipid-Conjugated Oligonucleotide and Anti-PD-L1 mAb are Active in Tumors with Inflamed Phenotype

[1379] To evaluate how a CD274 targeting lipid-conjugated oligonucleotide and anti-PD-L1 mAb behave in an inflamed tumor phenotype, MC-38 and Hepa1-6 tumors were evaluated in mice. Specifically, 5×10⁶ MC-38 cells were first implanted in C57BL/6 mice and when the tumors reached the size of 300-500 mm³, they were sorted and treated subcutaneously with either GalXC-Placebo-C18, GalXC-mCD274-C18 at 25 mg/kg or intraperitoneally with anti-PD-L1 mAb at 10 mg/kg. During the study, the tumors were measured twice a week. As expected, mAb demonstrated some anti-tumor efficacy in this inflamed tumor model FIG. 11A. GalXC-mCD274-C18 demonstrated almost identical growth inhibition as mAb suggesting that both behave similarly in this type of tumor model. In another study, Hepa1-6 tumors, another inflamed tumor model, were grown in C57BL/6 mice and treated with the same compounds. The anti-PD-L1 mAb demonstrated more tumor growth inhibition compared to the growth inhibition observed in MC-38 tumors (FIG. 11B). GalXC-mCD274-C18 was as efficient as the anti-PD-L1 mAb in this inflamed tumor as well suggesting that both compounds behave similarly in tumors with inflamed phenotype where the immunity cycle works effectively.

### Example 8: Combination of CD274 Targeting Lipid-Conjugated Oligonucleotide with Immune Checkpoint Antibodies Improves the Efficacy of Single Agents in Resistant and Inflamed Tumors

[1380] Based on the results presented here and literature, it is evident that PD-L1 expression in both host immune cells and tumor cells contribute to immune suppression, and that expression in both cell types could be predictive of sensitivity to therapeutic agents targeting the PD-L1/PD-1 axis in inflamed or partially inflamed tumor types (Lau et al, Nat. Commun., 8:14572, 2017). Since mAb targets both tumor and host extracellular PD-L1 and RNAi-PDL1 targets host extracellular and intracellular PD-L1 and demonstrate similar efficacy as single agents, it was investigated whether targeting PD-L1 using two different modalities could improve the efficacy of either of the single agents in these tumor types. To evaluate if combination of an immune checkpoint antibody with an anti-PD-L1 oligonucleotide would improve anti-tumor efficacy, studies were performed in the inflamed MC-38 tumor model and 4T1 checkpoint resistant model. MC-38 tumors were grown as described previously in C57BL/6 mice. Once the tumors reached the size of 300-500 mm³, mice were sorted into 4 groups (n=5) and treated with GalXC-Placebo-C18 or GalXC-mCD274-C18 with and without anti-PD-L1 mAb. GalXC compounds were dosed subcutaneously at 25 mg/kg and mAb was dosed intraperitoneally at 10 mg/kg at q3d×2. Tumor sizes were measured during the study period. As in FIG. 12, the combination of GalXC-mCD274-C18 and anti-PD-L1 mAb demonstrated improved efficacy compared to either of the single agents. Perforin staining was done of tumor tissue samples from the mice and increased perforin positive cells in tumors from mice treated with the combination was observed relative to control groups (FIG. 12B). This data supports the previous findings that the addition of PD-L1 mAb to RNAi-PDL1 treatment may increase the chances of targeting PD-L1 on both APCs and tumors and possibly other formats of PD-L1 that are not accessed by mAb in this tumor type. In addition, another study was conducted in 4T1 resistant model. 4T1 tumors were implanted in Balb/c mice and when the tumors reached the size of 300 mm³, they were sorted into 4 groups and treated with either i) GalXC-placebo-C18; or ii) anti-PD-L1 mAb; or, iii) GalXC-mCD274-C18 as single agents. GalXC compounds were dosed subcutaneously at 25 mg/kg and mAb was dosed intraperitoneally at 10 mg/kg on Days 6, 9, and 12. Treatment with GalXC-mCD274-C18 had improved anti-tumor efficacy compared to the anti-PD-L1 antibody (FIG. 13A). Since immunotherapy, especially blockade of the PD-1/PD-L1 and CTLA-4 axes, has resulted in durable responses in a range of cancer types with pre-existing immunity in patients, it was investigated whether combination could improve the activity of GalXC-CD274 in resistant tumors in preclinical mouse models. CTLA-4 mAb is thought to regulate T-cell proliferation early in an immune response, primarily in lymph nodes and thereby enhances the antigen presentation machinery (Seidel et al, Front. Oncol., 8:86, 2018). In contrast, PD-1 mAb suppresses T cells later in an immune response, primarily in peripheral tissues (Seidel et al, Front. Oncol., 8:86, 2018; Waldman et al, Nat. Rev. Immunol., Vol. 20: 651-668, 2020). Thus, CTLA-4 mAb may have a better chance of demonstrating some activity in resistant tumors compared to PD-1 or PD-L1 mAb treatments. Thus, it was evaluated whether combination therapy with the GalXC-mCD274-C18 oligonucleotide in combination with an anti-CTLA-4 immune checkpoint inhibitor would improve anti-tumor efficacy. Mice were administered GalXC-Placebo-C18 or GalXC-mCD274-C18 with and without an anti-CTLA-4 mAb (anti-mouse CTLA-4 mAb, clone #9H10, Cat #BP0131). As seen in FIG. 13B, the combination with anti-CTLA-4 mAb was able to increase the tumor growth inhibition by almost twice compared to anti-CTLA-4 mAb or GalXC-mCD274-C18 alone, and increase the presence of CD8+ cytotoxic T-cells in the tumor tissue (FIG. 13C), suggesting that this combination could be a potential combination therapy in clinic for resistant tumor types.

### Example 9: Generation of CD274-Targeting Double-Stranded RNAi Oligonucleotides

Identification of CD274 mRNA Target Sequences

[1381] To generate RNAi oligonucleotide inhibitors of human CD274 expression, a computer-based algorithm was used to computationally identify CD274 mRNA target sequences suitable for assaying inhibition of CD274 expression by the RNAi pathway. The algorithm provided RNAi oligonucleotide guide (antisense) strand sequences each having a region of complementarity to a suitable CD274 target sequence of human CD274 mRNA (Table 2). Some of the guide strand sequences identified by the algorithm were also complementary to the corresponding CD274 target sequence of monkey CD274 mRNA (Table 2) and/or mouse CD274 mRNA (Table 2) and/or rat CD274 mRNA (Table 2). CD274 RNAi oligonucleotides comprising a region of complementarity to homologous CD274 mRNA target sequences with nucleotide sequence similarity are predicted to have the ability to target homologous CD274 mRNAs.

TABLE 2
Sequences of Human, Monkey, Mouse, and Rat CD274 mRNA

| | | SEQ |
|---|---|---|
| Species | Ref Seq # | ID NO |
| Human (Hs) | NM_014143.4 | 1037 |
| Cynomolgus monkey (Mf) | XM_005581779.2 | 1038 |
| Mus Musculus (Mm) | NM_021893.3 | 1039 |
| Rattus norvegicus (Rn) | NM_001191954.1 | 1040 |

[1382] DsiRNAs identified in Table 3 were used to generate corresponding double-stranded RNAi oligonucleotides comprising a nicked tetraloop GalNAc-conjugated structure (referred to herein as “GalNAc-conjugated CD274 oligonucleotides” or “GalNAc-CD274 oligonucleotides”) having a 36-mer passenger strand and a 22-mer guide strand for evaluation in vitro. Further, the nucleotide sequences comprising the passenger strand and guide strand have a distinct pattern of modified nucleotides and phosphorothioate linkages.

TABLE 3
Distribution of dsiRNA across CD274
Sequence selection strategy: 240 sequences

| 108 Sequences from Exon 1-4 | | | | 132 Sequences from Exon 5-7 | | | |
|---|---|---|---|---|---|---|---|
| | | Hs | | | | Hs | |
| Location | Hs/Mf | Unique | Hs/Mf/Rat | Location | Hs/Mf | Unique | Hs/Mf/Rat |
| Exon 2 | 9 | 0 | 0 | Exon 5 | 5 | 0 | 0 |
| (CDS) | | | | (CDS) | | | |
| Exon 3 | 52 | 0 | 0 | Exon 6 | 0 | 1 | 0 |
| (CDS) | | | | (CDS) | | | |
| Exon 4 | 22 | 24 | 1 | Exon 7 | 96 | 29 | 1 |
| (CDS) | | | | (3′UTR) | | | |
| Total | 83 | 24 | 1 | Total | 101 | 30 | 1 |

| | |
|---|---|
| 108 | 132 |

[1383] Each GalNAc-CD274 oligonucleotide was generated with the same modification pattern, and each with a unique guide strand having a region of complementarity to a CD274 target sequence identified by SEQ ID NO: 1037. Modifications for the sense and anti-sense strand included the following:

Sense Strand:
5′ mX-S-mX-mX-mX-mX-mX-mX-fX-fX-fX-fX[-mX-]₁₆-
[ademX-GalNAc]-[ademX-GalNAc]-[ademX-GalNAc]-mX-
mX-mX-mX-mX-mX 3′.

### Hybridized to:

Antisense Strand:
5′ [MePhosphonate-4O-mX]-S-fX-S-fX-fX-fX-mX-fX-mX-
mX-fX-mX-mX-mX-fX-mX-mX-mX-mX-mX-mX-S-mX-S-mX 3′.

Or, represented as:

Sense Strand:
[mXs][mX][mX][mX][mX[mX][mX][fX][fX][fX][fX][mX]
[mX][mX][mX][mX][mX][mX][mX][mX][mX][mX][mX][mX]
[mX][mX][mX][ademA-GalNAc][ademA-GalNAc][ademA-
GalNAc][mX][mX[mX][mX][mX][mX]

### Hybridized to:

Antisense Strand:
[MePhosphonate-4O-mXs][fXs][fX][fX][fX][mX][fX]
[mX][mX][fX][mX][mX][mX][fX][mX][mX][mX][mX][mX]
[mXs][mXs][mX]

### (Modification key: Table 1).

[1384] The ability of each of the GalNAc-CD274 oligonucleotides in Table 4 to reduce CD274 mRNA was measured using in vitro cell-based assays. Briefly, colon carcinoma (RKO) cells expressing endogenous human CD274 gene were transfected with each of the GalNAc-CD274 oligonucleotides listed in Table 4 and FIG. 14 at 1 nM in separate wells of a multi-well cell-culture plate. Cells were maintained for 28 hours following transfection with the GalNAc-CD274 oligonucleotides, and then the amount of remaining CD274 mRNA from the transfected cells was determined using TAQMAN®-based qPCR assays. Two qPCR assays, a 3′ assay (Hs01125301_m1; Assay location: 956, Exon Boundary: 6-7, Amplicon Length: 89) and a 5′ assay (Hs00204257_m1; Assay location: 503, Exon Boundary: 3-4, Amplicon Length: 77) were used to determine CD274 mRNA levels as measured using PCR probes conjugated to FAM-MGB. Each primer pair was assayed for % remaining RNA as shown in Table 4 and FIG. 14. The RKO cell-based assay evaluating the ability of the GalNAc-CD274 oligonucleotides listed in Table 4 and FIG. 14 to inhibit CD274 expression identified several candidate oligonucleotides.

TABLE 4
Analysis of CD274 mRNA in RKO cells

| | SED ID | | | | | |
|---|---|---|---|---|---|---|
| SED ID | NO | | | | | |
| NO | (Anti- | | | | | |
| (Sense | sense | | CD274-5′ Assay | | CD274-3′ Assay | |
| Strand) | Strand) | DsiRNA name | % remaining | SEM | % remaining | SEM |
| 483 | 724 | CD274-0088 | 31.131 | 8.166 | 81.52 | 15.779 |
| 484 | 725 | CD274-0094 | 22.467 | 1.982 | 68.275 | 9.8 |
| 519 | 760 | CD274-0095 | 27.836 | 2.463 | 83.562 | 5.402 |
| 486 | 727 | CD274-0097 | 14.624 | 1.989 | 37.777 | 6.621 |
| 487 | 728 | CD274-0098 | 19.688 | 5.22 | 58.411 | 17.505 |
| 520 | 761 | CD274-0099 | 21.654 | 2.444 | 58.524 | 6.653 |
| 488 | 729 | CD274-0100 | 21.955 | 1.686 | 58.043 | 5.27 |
| 489 | 730 | CD274-0102 | 14.706 | 3.206 | 36.176 | 7.098 |
| 521 | 762 | CD274-0103 | 43.544 | 8.938 | 110.249 | 15.649 |
| 490 | 731 | CD274-0167 | 30.462 | 6.748 | 85.565 | 14.554 |
| 491 | 732 | CD274-0193 | 18.532 | 1.77 | 42.613 | 2.838 |
| 492 | 733 | CD274-0194 | 25.08 | 3.734 | 52.139 | 5.447 |
| 522 | 763 | CD274-0195 | 45.2 | 12.572 | 88.839 | 21.094 |
| 523 | 764 | CD274-0196 | 26.453 | 2.662 | 78.79 | 10.877 |
| 493 | 734 | CD274-0197 | 32.419 | 4.17 | 62.235 | 8.532 |
| 524 | 765 | CD274-0198 | 32.598 | 7.179 | 72.723 | 17.723 |
| 525 | 766 | CD274-0199 | 62.634 | 20.672 | 147.834 | 27.428 |
| 494 | 735 | CD274-0200 | 33.61 | 9.742 | 63.268 | 15.099 |
| 526 | 767 | CD274-0201 | 20.67 | 8.82 | 52.382 | 19.352 |
| 527 | 768 | CD274-0202 | 44.248 | 3.273 | 72.803 | 4.238 |
| 495 | 736 | CD274-0204 | 24.794 | 3.963 | 64.526 | 10.869 |
| 528 | 769 | CD274-0207 | 46.253 | 6.873 | 77.443 | 7.824 |
| 496 | 737 | CD274-0219 | 22.568 | 1.5 | 45.206 | 3.705 |
| 529 | 770 | CD274-0221 | 36.692 | 7.56 | 72.824 | 14.824 |
| 497 | 738 | CD274-0222 | 17.408 | 4.065 | 45.821 | 11.643 |
| 498 | 739 | CD274-0225 | 22.667 | 4.679 | 65.495 | 14.048 |
| 530 | 771 | CD274-0245 | 40.961 | 2.67 | 97.103 | 7.481 |
| 531 | 772 | CD274-0248 | 35.884 | 9.454 | 69.114 | 17.944 |
| 532 | 773 | CD274-0249 | 32.318 | 9.969 | 67.66 | 23.129 |
| 533 | 774 | CD274-0265 | 52.712 | 5.609 | 77.545 | 4.677 |
| 534 | 775 | CD274-0266 | 48.364 | 12.889 | 92.158 | 27.092 |
| 535 | 776 | CD274-0267 | 67.687 | 7.444 | 111.065 | 12.415 |
| 499 | 740 | CD274-0268 | 24.417 | 5.5 | 60.403 | 14.082 |
| 500 | 741 | CD274-0269 | 23.346 | 1.106 | 49.42 | 2.061 |
| 536 | 777 | CD274-0270 | 37.356 | 3.264 | 82.157 | 6.125 |
| 501 | 742 | CD274-0271 | 33.57 | 20.274 | 59.016 | 35.992 |
| 537 | 778 | CD274-0272 | 23.079 | 4.531 | 50.465 | 8.805 |
| 538 | 779 | CD274-0273 | 35.336 | 7.161 | 71.047 | 11.705 |
| 502 | 743 | CD274-0274 | 17.571 | 4.631 | 44.591 | 13.132 |
| 503 | 744 | CD274-0275 | 23.769 | 6.433 | 68.437 | 18.304 |
| 539 | 780 | CD274-0276 | 86.685 | 14.294 | 93.539 | 14.98 |
| 504 | 745 | CD274-0277 | 40.665 | 2.339 | 61.793 | 4.828 |
| 540 | 781 | CD274-0278 | 39.561 | 3.986 | 65.163 | 5.506 |
| 541 | 782 | CD274-0279 | 78.972 | 9.244 | 95.57 | 12.252 |
| 542 | 783 | CD274-0280 | 60.112 | 11.875 | 66.845 | 12.462 |
| 543 | 784 | CD274-0281 | 62.654 | 1.914 | 115.961 | 7.28 |
| 505 | 746 | CD274-0282 | 27.321 | 1.139 | 59.937 | 4.127 |
| 506 | 747 | CD274-0283 | 27.658 | 4.375 | 63.588 | 12.755 |
| 544 | 785 | CD274-0285 | 55.463 | 9.866 | 87.534 | 19.056 |
| 545 | 786 | CD274-0303 | 35.186 | 5.987 | 75.895 | 10.403 |
| 546 | 787 | CD274-0305 | 56.025 | 3.939 | 113.756 | 8.055 |
| 547 | 788 | CD274-0308 | 71.524 | 6.064 | 142.48 | 11.081 |
| 548 | 789 | CD274-0309 | 85.974 | 18.56 | 104.235 | 20.277 |
| 549 | 790 | CD274-0310 | 60.856 | 7.784 | 102.91 | 14.216 |
| 550 | 791 | CD274-0312 | 81.697 | 18.488 | 101.073 | 24.339 |
| 551 | 792 | CD274-0313 | 47.952 | 10.222 | 86.381 | 17.656 |
| 552 | 793 | CD274-0392 | 35.313 | 10.073 | 72.643 | 19.061 |
| 507 | 748 | CD274-0394 | 34.533 | 4.527 | 61.795 | 10.376 |
| 553 | 794 | CD274-0395 | 57.943 | 3.249 | 85.57 | 2.828 |
| 554 | 795 | CD274-0398 | 78.961 | 5.981 | 108.755 | 5.647 |
| 508 | 749 | CD274-0399 | 45.247 | 5.935 | 69.271 | 6.786 |
| 555 | 796 | CD274-0497 | 49.399 | 8.31 | 72.717 | 11.033 |
| 556 | 797 | CD274-0499 | 45.77 | 10.107 | 83.657 | 17.594 |
| 557 | 798 | CD274-0500 | 60.879 | 5.775 | 95.202 | 9.23 |
| 558 | 799 | CD274-0501 | 79.425 | 7.344 | 110.765 | 11.3 |
| 559 | 800 | CD274-0502 | 101.777 | 11.072 | 115.645 | 10.26 |
| 560 | 801 | CD274-0504 | 86.588 | 5.657 | 97.582 | 5.378 |
| 561 | 802 | CD274-0505 | 88.084 | 8.852 | 119.591 | 18.275 |
| 562 | 803 | CD274-0506 | 80.134 | 8.34 | 89.148 | 11.903 |
| 563 | 804 | CD274-0507 | 84.236 | 19.13 | 99.615 | 27.193 |
| 564 | 805 | CD274-0509 | 59.654 | 11.452 | 93.381 | 20.147 |
| 565 | 806 | CD274-0510 | 84.182 | 13.358 | 121.09 | 23.181 |
| 566 | 807 | CD274-0511 | 37.722 | 8.209 | 71.435 | 16.151 |
| 567 | 808 | CD274-0513 | 69.923 | 4.642 | 89.348 | 5.818 |
| 509 | 750 | CD274-0530 | 41.726 | 8.837 | 62.528 | 16.987 |
| 510 | 751 | CD274-0531 | 49.269 | 4.524 | 69.733 | 5.656 |
| 568 | 809 | CD274-0535 | 42.833 | 2.855 | 65.22 | 5.915 |
| 569 | 810 | CD274-0537 | 35.5 | 1.623 | 56.41 | 2.935 |
| 570 | 811 | CD274-0542 | 36.307 | 9.025 | 65.621 | 16.508 |
| 571 | 812 | CD274-0583 | 64.631 | 18.243 | 117.563 | 34.03 |
| 572 | 813 | CD274-0594 | 64.738 | 6.236 | 96.315 | 7.453 |
| 573 | 814 | CD274-0601 | 57.424 | 2.985 | 101.399 | 6.459 |
| 511 | 752 | CD274-0653 | 39.347 | 7.458 | 63.368 | 11.409 |
| 574 | 815 | CD274-0654 | 38.035 | 2.244 | 68.814 | 4.15 |
| 575 | 816 | CD274-0655 | 50.502 | 6.281 | 72.479 | 9.581 |
| 576 | 817 | CD274-0656 | 26.434 | 2.197 | 42.131 | 3.669 |
| 577 | 818 | CD274-0658 | 40.229 | 11.877 | 88.739 | 30.141 |
| 578 | 819 | CD274-0661 | 55.074 | 24.269 | 112.789 | 56.263 |
| 579 | 820 | CD274-0667 | 44.652 | 2.824 | 71.567 | 3.542 |
| 512 | 753 | CD274-0673 | 31.408 | 3.369 | 58.398 | 7.122 |
| 580 | 821 | CD274-0676 | 52.316 | 5.006 | 67.287 | 9.849 |
| 581 | 822 | CD274-0679 | 43.883 | 5.096 | 76.975 | 8.949 |
| 582 | 823 | CD274-0681 | 60.948 | 20.529 | 104.591 | 37.457 |
| 583 | 824 | CD274-0685 | 30.2 | 2.29 | 54.492 | 4.559 |
| 584 | 825 | CD274-0692 | 45.56 | 13.81 | 91.513 | 27.21 |
| 513 | 754 | CD274-0693 | 41.287 | 8.011 | 77.58 | 15.297 |
| 585 | 826 | CD274-0695 | 45.63 | 4.714 | 81.152 | 7.448 |
| 586 | 827 | CD274-0696 | 41.525 | 1.814 | 58.329 | 1.93 |
| 514 | 755 | CD274-0697 | 42.473 | 7.504 | 72.755 | 14.161 |
| 587 | 828 | CD274-0698 | 48.288 | 5.829 | 80.46 | 9.816 |
| 515 | 756 | CD274-0700 | 33.352 | 3.445 | 53.838 | 6.534 |
| 516 | 757 | CD274-0701 | 54.142 | 21.568 | 55.952 | 27.121 |
| 588 | 829 | CD274-0703 | 58.221 | 3.36 | 88.83 | 6.412 |
| 589 | 830 | CD274-0709 | 77.371 | 7.558 | 94.049 | 8.223 |
| 517 | 758 | CD274-0743 | 44.282 | 2.319 | 126.324 | 5.388 |
| 590 | 831 | CD274-0745 | 65.521 | 2.253 | 90.277 | 3.219 |
| 518 | 759 | CD274-0746 | 36.95 | 4.351 | 71.04 | 10.009 |
| 591 | 832 | CD274-0749 | 65.698 | 9.266 | 92.359 | 12.22 |
| 592 | 833 | CD274-0752 | 77.711 | 14.747 | 81.458 | 12.595 |
| 593 | 834 | CD274-0800 | 101.614 | 12.187 | 84.061 | 7.365 |
| 594 | 835 | CD274-0804 | 94.618 | 10.291 | 64.501 | 3.344 |
| 595 | 836 | CD274-0847 | 87.273 | 10.051 | 66.012 | 8.744 |
| 596 | 837 | CD274-0852 | 81.629 | 6.848 | 71.983 | 4.279 |
| 597 | 838 | CD274-0889 | 84.449 | 2.629 | 76.008 | 3.317 |
| 598 | 839 | CD274-1172 | 87.554 | 20.066 | 75.283 | 21.587 |
| 599 | 840 | CD274-1173 | 77.381 | 6.273 | 51.721 | 4.623 |
| 600 | 841 | CD274-1174 | 76.232 | 2.502 | 57.527 | 1.389 |
| 601 | 842 | CD274-1176 | 92.286 | 4.181 | 72.036 | 3.177 |
| 602 | 843 | CD274-1178 | 90.703 | 9.822 | 65.447 | 9.592 |
| 603 | 844 | CD274-1227 | 87.843 | 14.618 | 61.184 | 11.576 |
| 604 | 845 | CD274-1231 | 99.647 | 16.42 | 101.278 | 15.079 |
| 605 | 846 | CD274-1423 | 74.846 | 7.088 | 57.747 | 3.354 |
| 606 | 847 | CD274-1425 | 70.873 | 7.145 | 51.942 | 3.924 |
| 607 | 848 | CD274-1459 | 67.012 | 4.231 | 47.607 | 2.626 |
| 608 | 849 | CD274-1460 | 73.956 | 3.971 | 44.648 | 1.563 |
| 609 | 850 | CD274-1461 | 73.688 | 5.333 | 39.205 | 2.882 |
| 610 | 851 | CD274-1462 | 71.131 | 7.851 | 38.196 | 3.75 |
| 611 | 852 | CD274-1463 | 94.585 | 11.296 | 68.95 | 4.86 |
| 612 | 853 | CD274-1464 | 71.931 | 5.855 | 68.114 | 4.49 |
| 613 | 854 | CD274-1465 | 63.807 | 6.413 | 43.567 | 3.485 |
| 614 | 855 | CD274-1467 | 61.71 | 6.34 | 48.726 | 3.334 |
| 615 | 856 | CD274-1469 | 61.962 | 4.694 | 39.678 | 3.636 |
| 616 | 857 | CD274-1470 | 67.735 | 20.113 | 50.039 | 13.925 |
| 617 | 858 | CD274-1473 | 68.872 | 5.99 | 49.518 | 4.118 |
| 618 | 859 | CD274-1474 | 75.242 | 6.376 | 47.828 | 3.511 |
| 619 | 860 | CD274-1481 | 79.557 | 11.572 | 67.562 | 9.505 |
| 620 | 861 | CD274-1484 | 76.996 | 17.926 | 66.005 | 13.328 |
| 621 | 862 | CD274-1486 | 64.851 | 7.712 | 44.903 | 5.084 |
| 622 | 863 | CD274-1499 | 75.557 | 9.817 | 65.643 | 9.631 |
| 623 | 864 | CD274-1500 | 70.205 | 2.619 | 63.891 | 2.108 |
| 624 | 865 | CD274-1541 | 68.299 | 4.42 | 49.619 | 3.3 |
| 625 | 866 | CD274-1562 | 71.195 | 4.333 | 57.049 | 5.217 |
| 626 | 867 | CD274-1606 | 78.485 | 18.402 | 80.868 | 17.544 |
| 627 | 868 | CD274-1607 | 71.565 | 3.599 | 58.279 | 3.459 |
| 628 | 869 | CD274-1649 | 76.356 | 9.594 | 68.991 | 7.379 |
| 629 | 870 | CD274-1728 | 77.22 | 18.743 | 67.444 | 17.035 |
| 630 | 871 | CD274-1794 | 76.237 | 4.033 | 84.87 | 5.324 |
| 631 | 872 | CD274-1795 | 80.053 | 11.775 | 92.368 | 10.395 |
| 632 | 873 | CD274-1806 | 74.8 | 8.029 | 56.655 | 9.198 |
| 633 | 874 | CD274-1807 | 80.433 | 16.631 | 77.905 | 20.096 |
| 634 | 875 | CD274-1808 | 73.574 | 11.705 | 59.667 | 5.989 |
| 635 | 876 | CD274-1809 | 86.54 | 14.407 | 71.61 | 10.012 |
| 636 | 877 | CD274-1810 | 84.532 | 11.837 | 62.905 | 7.538 |
| 637 | 878 | CD274-1811 | 84.074 | 3.107 | 78.893 | 5.342 |
| 638 | 879 | CD274-1812 | 83.763 | 8.447 | 72.064 | 6.848 |
| 639 | 880 | CD274-1906 | 82.981 | 2.043 | 83.87 | 4.354 |
| 640 | 881 | CD274-1907 | 78.78 | 11.148 | 71.935 | 8.162 |
| 641 | 882 | CD274-1908 | 80.371 | 6.974 | 80.41 | 7.182 |
| 642 | 883 | CD274-1909 | 74.66 | 5.311 | 70.485 | 4.094 |
| 643 | 884 | CD274-1910 | 85.884 | 10.611 | 60.787 | 7.087 |
| 644 | 885 | CD274-1913 | 76.59 | 12.573 | 68.56 | 11.281 |
| 645 | 886 | CD274-1915 | 69.771 | 3.545 | 68.054 | 4.276 |
| 646 | 887 | CD274-1919 | 82.047 | 6.525 | 76.726 | 8.448 |
| 647 | 888 | CD274-1931 | 72.74 | 6.142 | 59.325 | 6.893 |
| 648 | 889 | CD274-1935 | 77.483 | 5.082 | 56.988 | 4.098 |
| 649 | 890 | CD274-1937 | 68.404 | 11.544 | 52.111 | 8.172 |
| 650 | 891 | CD274-2014 | 76.822 | 4.852 | 68.445 | 5.364 |
| 651 | 892 | CD274-2088 | 91.722 | 14.303 | 65.355 | 14.579 |
| 652 | 893 | CD274-2221 | 86.013 | 6.484 | 69.271 | 4.694 |
| 653 | 894 | CD274-2225 | 75.122 | 4.509 | 74.009 | 4.759 |
| 654 | 895 | CD274-2227 | 81.197 | 4.121 | 81.293 | 5.032 |
| 655 | 896 | CD274-2228 | 67.462 | 2.955 | 56.161 | 4.178 |
| 656 | 897 | CD274-2229 | 70.281 | 4.973 | 65.174 | 3.579 |
| 657 | 898 | CD274-2231 | 86.398 | 9.572 | 68.494 | 9.207 |
| 658 | 899 | CD274-2233 | 79.982 | 10.124 | 67.927 | 8.868 |
| 659 | 900 | CD274-2263 | | | 87.346 | 14.266 |
| 660 | 901 | CD274-2266 | 82.392 | 3.97 | 94.145 | 5.632 |
| 661 | 902 | CD274-2333 | 67.739 | 3.609 | 74.549 | 4.779 |
| 662 | 903 | CD274-2335 | 71.904 | 10.781 | 71.563 | 11.226 |
| 663 | 904 | CD274-2337 | 67.641 | 4.013 | 66.638 | 4.701 |
| 664 | 905 | CD274-2338 | 68.988 | 7.212 | 62.032 | 4.997 |
| 665 | 906 | CD274-2339 | 65.341 | 7.397 | 65.622 | 6.824 |
| 666 | 907 | CD274-2341 | 71.849 | 7.242 | 60.174 | 5.111 |
| 667 | 908 | CD274-2343 | 102.538 | 9.126 | 123.408 | 9.475 |
| 668 | 909 | CD274-2362 | 89.652 | 12.296 | 76.304 | 10.019 |
| 669 | 910 | CD274-2363 | 77.02 | 4.291 | 68.242 | 3.643 |
| 670 | 911 | CD274-2407 | 74.086 | 5.292 | 78.084 | 5.515 |
| 671 | 912 | CD274-2556 | 73.666 | 19.942 | 78.02 | 17.788 |
| 672 | 913 | CD274-2557 | 74.91 | 7.804 | 74.17 | 8.223 |
| 673 | 914 | CD274-2561 | 76.481 | 4.198 | 90.053 | 6.788 |
| 674 | 915 | CD274-2562 | 69.872 | 16.664 | 76.055 | 17.434 |
| 675 | 916 | CD274-2563 | 80.051 | 11.551 | 76.803 | 10.262 |
| 676 | 917 | CD274-2565 | 59.49 | 16.262 | 89.121 | 21.009 |
| 677 | 918 | CD274-2568 | 74.185 | 8.521 | 104.189 | 12.759 |
| 678 | 919 | CD274-2634 | 76.654 | 16.677 | 83.99 | 15.417 |
| 679 | 920 | CD274-2636 | 90.954 | 26.89 | 93.168 | 28.42 |
| 680 | 921 | CD274-2637 | 91.338 | 25.739 | 85.813 | 21.959 |
| 681 | 922 | CD274-2640 | 116.761 | 12.198 | 113.669 | 11.745 |
| 682 | 923 | CD274-2673 | 86.028 | 24.44 | 77.461 | 19.531 |
| 683 | 924 | CD274-2678 | 114.031 | 17.007 | 90.335 | 10.099 |
| 684 | 925 | CD274-2679 | 78.274 | 29.426 | 96.469 | 26.668 |
| 685 | 926 | CD274-2801 | 82.569 | 11.526 | 100.836 | 15.161 |
| 686 | 927 | CD274-2815 | 86.338 | 23.745 | 78.125 | 21.969 |
| 687 | 928 | CD274-2819 | 96.07 | 9.877 | 71.233 | 5.842 |
| 688 | 929 | CD274-2924 | 94.156 | 15.497 | 50.28 | 7.591 |
| 689 | 930 | CD274-2935 | 91.167 | 9.762 | 74.965 | 7.967 |
| 690 | 931 | CD274-2936 | 99.059 | 17.897 | 84.048 | 14.829 |
| 691 | 932 | CD274-2937 | 106.083 | 10.705 | 97.768 | 11.766 |
| 692 | 933 | CD274-2939 | 106.806 | 17.393 | 109.05 | 17.098 |
| 693 | 934 | CD274-2994 | 69.771 | 9.976 | 72.625 | 11.959 |
| 694 | 935 | CD274-3015 | 96.283 | 38.168 | 92.756 | 32.238 |
| 695 | 936 | CD274-3019 | 92.724 | 6.653 | 64.357 | 2.981 |
| 696 | 937 | CD274-3094 | 90.184 | 16.514 | 80.36 | 11.63 |
| 697 | 938 | CD274-3095 | 113.735 | 16.856 | 102.098 | 11.162 |
| 698 | 939 | CD274-3305 | 86.273 | 22.8 | 70.121 | 13.416 |
| 699 | 940 | CD274-3306 | 100.649 | 21.391 | 87.516 | 16.825 |
| 700 | 941 | CD274-3307 | 87.853 | 5.819 | 67.927 | 5.719 |
| 701 | 942 | CD274-3308 | 78.768 | 8.254 | 84.03 | 9.488 |
| 702 | 943 | CD274-3310 | 74.787 | 5.185 | 60.7 | 4.36 |
| 703 | 944 | CD274-3319 | 70.915 | 5.742 | 62.091 | 3.153 |
| 704 | 945 | CD274-3325 | 71.261 | 4.837 | 54.784 | 3.032 |
| 705 | 946 | CD274-3355 | 70.529 | 7.469 | 52.859 | 4.601 |
| 706 | 947 | CD274-3357 | 69.587 | 10.871 | 67.389 | 9.487 |
| 707 | 948 | CD274-3441 | 97.36 | 8.347 | 80.562 | 8.503 |
| 708 | 949 | CD274-3522 | 66.524 | 4.472 | 71.288 | 6.057 |
| 709 | 950 | CD274-3528 | 73.115 | 19.545 | 68.012 | 18.797 |
| 710 | 951 | CD274-3531 | 70.512 | 4.608 | 61.545 | 7.75 |
| 711 | 952 | CD274-3532 | 73.266 | 3.514 | 55.408 | 5.591 |
| 712 | 953 | CD274-3534 | 66.004 | 10.803 | 68.839 | 13.256 |
| 713 | 954 | CD274-3541 | 73.463 | 10.63 | 69.396 | 10.755 |
| 714 | 955 | CD274-3542 | 64.873 | 3.182 | 60.533 | 3.872 |
| 715 | 956 | CD274-3545 | 80.501 | 4.498 | 85.456 | 4.598 |
| 716 | 957 | CD274-3546 | 73.681 | 11.453 | 62.886 | 5.905 |
| 717 | 958 | CD274-3569 | 66.64 | 5.295 | 101.888 | 5.931 |
| 718 | 959 | CD274-3577 | 80.081 | 5.329 | 87.497 | 5.765 |
| 719 | 960 | CD274-3578 | 68.184 | 5.522 | 69.505 | 4.931 |
| 720 | 961 | CD274-3580 | 87.343 | 6.656 | 97.01 | 4.904 |
| 721 | 962 | CD274-3604 | 91.519 | 15.223 | 100.502 | 17.138 |
| 722 | 963 | CD274-3610 | 69.406 | 18.142 | 82.185 | 20.548 |
| 723 | 964 | CD274-3622 | 76.133 | 6.237 | 103.52 | 7.601 |

[1385] Taken together, these results show that GalNAc-CD274 oligonucleotides designed to target human CD274 mRNA inhibit CD274 expression in cells, as determined by a reduced amount of CD274 mRNA in the oligo-transfected cells relative to control cells. These results demonstrate that multiple CD274 mRNA target sequences are suitable for the RNAi-mediated inhibition of CD274 expression.

[1386] Following the initial in vitro screen, 35 constructs were selected for dosing studies. RKO cells were treated for 28 hours with 0.3 nM, 1 nM, and 3 nM of oligonucleotide. mRNA was isolated and measured to determine a potent dose (Table 5 and FIG. 15). These 35 sequences were selected for further testing in vivo (Table 5).

TABLE 5
Analysis of CD274 mRNA in Dose-Response Study in RKO cells

| | SED | | | | | | | |
|---|---|---|---|---|---|---|---|---|
| SED | ID NO | | | | | | 3 nM | |
| ID NO | (Anti- | | 0.3 nM | | 1 nM | | % | |
| (Sense | sense | DsiRNA | % | | % | | remain- | |
| Strand) | Strand) | name | remaining | SEM | remaining | SEM | ning | SEM |
| 965 | 1001 | CD274- | 68.1955 | 31.557 | 32.646 | 3.926 | 33.502 | 4.3365 |
| | | 0088 | | | | | | |
| 966 | 1002 | CD274- | 72.109 | 24.156 | 40.2615 | 12.015 | 37.8635 | 5.6855 |
| | | 0094 | | | | | | |
| 968 | 1004 | CD274- | 54.846 | 33.252 | 25.9785 | 2.167 | 24.9755 | 3.211 |
| | | 0097 | | | | | | |
| 969 | 1005 | CD274- | 67.9855 | 12.935 | 29.752 | 4.634 | 30.931 | 8.1975 |
| | | 0098 | | | | | | |
| 970 | 1006 | CD274- | 100.6175 | 8.997 | 39.67 | 10.359 | 36.75 | 7.879 |
| | | 0100 | | | | | | |
| 971 | 1007 | CD274- | 71.2525 | 7.3865 | 31.3205 | 2.9865 | 28.8135 | 7.1 |
| | | 0102 | | | | | | |
| 972 | 1008 | CD274- | 97.637 | 10.468 | 48.4765 | 13.39 | 52.562 | 30.5185 |
| | | 0167 | | | | | | |
| 973 | 1009 | CD274- | 59.014 | 6.947 | 26.147 | 9.728 | 25.486 | 2.387 |
| | | 0193 | | | | | | |
| 974 | 1010 | CD274- | 75.9815 | 12.73 | 58.997 | 15.777 | 28.4995 | 4.571 |
| | | 0194 | | | | | | |
| 975 | 1011 | CD274- | 78.4815 | 13.49 | 48.243 | 7.3815 | 42.379 | 3.358 |
| | | 0197 | | | | | | |
| 976 | 1012 | CD274- | 156.4925 | 47.47 | 57.041 | 23.257 | 37.7115 | 6.934 |
| | | 0200 | | | | | | |
| 977 | 1013 | CD274- | 106.8325 | 9.817 | 61.8775 | 22.394 | 44.528 | 14.2665 |
| | | 0204 | | | | | | |
| 978 | 1014 | CD274- | 106.3655 | 21.452 | 46.4935 | 8.115 | 34.067 | 8.9845 |
| | | 0219 | | | | | | |
| 979 | 1015 | CD274- | 76.658 | 14.271 | 36.3755 | 3.496 | 30.22 | 3.363 |
| | | 0222 | | | | | | |
| 980 | 1016 | CD274- | 105.7635 | 15.12 | 49.802 | 17.709 | 44.4205 | 11.9215 |
| | | 0225 | | | | | | |
| 981 | 1017 | CD274- | 81.539 | 10.697 | 48.6485 | 21.03 | 40.641 | 3.9295 |
| | | 0268 | | | | | | |
| 982 | 1018 | CD274- | 73.5275 | 13.628 | 55.9515 | 14.881 | 34.307 | 4.9905 |
| | | 0269 | | | | | | |
| 983 | 1019 | CD274- | 86.224 | 30.539 | 31.723 | 10.452 | 21.7565 | 2.667 |
| | | 0271 | | | | | | |
| 984 | 1020 | CD274- | 83.681 | 17.969 | 41.605 | 5.468 | 24.918 | 1.8835 |
| | | 0274 | | | | | | |
| 985 | 1021 | CD274- | 157.842 | 33.757 | 52.7885 | 13.872 | 29.4355 | 8.9055 |
| | | 0275 | | | | | | |
| 986 | 1022 | CD274- | 120.044 | 28.594 | 47.641 | 11.204 | 35.6665 | 15.304 |
| | | 0277 | | | | | | |
| 987 | 1023 | CD274- | 165.271 | 96.96 | 58.836 | 11.438 | 42.219 | 10.556 |
| | | 0282 | | | | | | |
| 988 | 1024 | CD274- | 112.219 | 19.616 | 48.9925 | 5.1515 | 54.382 | 13.5605 |
| | | 0283 | | | | | | |
| 989 | 1025 | CD274- | 64.8195 | 17.67 | 45.841 | 6.484 | 38.6535 | 3.2605 |
| | | 0394 | | | | | | |
| 990 | 1026 | CD274- | 72.1765 | 27.798 | 35.8075 | 12.719 | 43.658 | 19.6795 |
| | | 0399 | | | | | | |
| 991 | 1027 | CD274- | 91.8045 | 12.211 | 54.1095 | 10.602 | 33.9605 | 13.324 |
| | | 0530 | | | | | | |
| 992 | 1028 | CD274- | 73.99 | 15.171 | 57.32 | 8.2855 | 77.3445 | 23.5255 |
| | | 0531 | | | | | | |
| 993 | 1029 | CD274- | 70.4845 | 15.655 | 58.6105 | 9.457 | 35.415 | 4.795 |
| | | 0653 | | | | | | |
| 994 | 1030 | CD274- | 81.868 | 14.69 | 57.382 | 12.075 | 46.3645 | 5.087 |
| | | 0673 | | | | | | |
| 995 | 1031 | CD274- | 88.8905 | 17.812 | 65.039 | 8.101 | 58.942 | 4.6735 |
| | | 0693 | | | | | | |
| 996 | 1032 | CD274- | 72.578 | 18.137 | 70.689 | 13.116 | 98.576 | 9.4475 |
| | | 0697 | | | | | | |
| 997 | 1033 | CD274- | 88.039 | 17.009 | 60.3425 | 23.253 | 37.3435 | 7.3575 |
| | | 0700 | | | | | | |
| 998 | 1034 | CD274- | 64.731 | 12.59 | 37.932 | 11.519 | 49.3725 | 8.95 |
| | | 0701 | | | | | | |
| 999 | 1035 | CD274- | 56.5995 | 13.036 | 50.3755 | 8.645 | 54.8205 | 5.1925 |
| | | 0743 | | | | | | |
| 1000 | 1036 | CD274- | 55.083 | 7.7535 | 47.8085 | 11.22 | 54.9725 | 16.1295 |
| | | 0746 | | | | | | |

### Example 10: RNAi Oligonucleotide Inhibition of CD274 In Vivo

[1387] The in vitro screening assay in Example 9 validated the ability of CD274-targeting oligonucleotides to knock-down target mRNA. To confirm the ability of the RNAi oligonucleotides to knockdown CD274 in vivo, an HDI mouse model was used. Thirty-five GalNAc conjugated oligonucleotides selected from the in vitro screen were evaluated in mice engineered to transiently express human CD274 mRNA in hepatocytes of the mouse liver in two studies (FIGS. 16A and 16B). Briefly, 6-8-week-old female CD-1 mice (n=4) were subcutaneously administered the indicated GalNAc-conjugated CD274 oligonucleotides (17 in FIG. 16A and 18 in FIG. 16B; listed in Table 6) at a dose of 2 mg/kg formulated in PBS. A control group of mice (n=4) were administered only PBS. Three days later (72 hours), the mice were hydrodynamically injected (HDI) with a DNA plasmid encoding the full human CD274 gene (50 lag) under control of a ubiquitous cytomegalovirus (CMV) promoter sequence. About 20 hours after introduction of the DNA plasmid, liver samples from HDI mice were collected. Total RNA derived from these HDI mice were subjected to qRT-PCR analysis to determine CD274 mRNA levels as described in Example 11. mRNA levels were measured for human mRNA. The values were normalized for transfection efficiency using the NeoR gene included on the DNA plasmid.

TABLE 6
GalNAc-Conjugated Human CD274 RNAi
Oligonucleotides for HDI screen.

| | Unmodified | Unmodified | Modified | Modified |
|---|---|---|---|---|
| | Sense | Antisense | Sense | Antisense |
| | Strand | strand | Strand | strand |
| CD274-0088 | 483 | 724 | 965 | 1001 |
| CD274-0094 | 484 | 725 | 966 | 1002 |
| CD274-0097 | 486 | 727 | 968 | 1004 |
| CD274-0098 | 487 | 728 | 969 | 1005 |
| CD274-0100 | 488 | 729 | 970 | 1006 |
| CD274-0102 | 489 | 730 | 971 | 1007 |
| CD274-0167 | 490 | 731 | 972 | 1008 |
| CD274-0194 | 492 | 733 | 974 | 1010 |
| CD274-0197 | 493 | 734 | 975 | 1011 |
| CD274-0200 | 494 | 735 | 976 | 1012 |
| CD274-0204 | 495 | 736 | 977 | 1013 |
| CD274-0219 | 496 | 737 | 978 | 1014 |
| CD274-0222 | 497 | 738 | 979 | 1015 |
| CD274-0225 | 498 | 739 | 980 | 1016 |
| CD274-0268 | 499 | 740 | 981 | 1017 |
| CD274-0269 | 500 | 741 | 982 | 1018 |
| CD274-0271 | 501 | 742 | 983 | 1019 |
| CD274-0274 | 502 | 743 | 984 | 1020 |
| CD274-0275 | 503 | 744 | 985 | 1021 |
| CD274-0277 | 504 | 745 | 986 | 1022 |
| CD274-0282 | 505 | 746 | 987 | 1023 |
| CD274-0283 | 506 | 747 | 988 | 1024 |
| CD274-0394 | 507 | 748 | 989 | 1025 |
| CD274-0399 | 508 | 749 | 990 | 1026 |
| CD274-0530 | 509 | 750 | 991 | 1027 |
| CD274-0531 | 510 | 751 | 992 | 1028 |
| CD274-0653 | 511 | 752 | 993 | 1029 |
| CD274-0673 | 512 | 753 | 994 | 1030 |
| CD274-0693 | 513 | 754 | 995 | 1031 |
| CD274-0697 | 514 | 755 | 996 | 1032 |
| CD274-0700 | 515 | 756 | 997 | 1033 |
| CD274-0701 | 516 | 757 | 998 | 1034 |
| CD274-0743 | 517 | 758 | 999 | 1035 |
| CD274-0746 | 518 | 759 | 1000 | 1036 |
| CD274-0193 | 491 | 732 | 973 | 1009 |

[1388] The results in FIGS. 16A and 16B demonstrate that GalNAc-conjugated CD274 oligonucleotides designed to target human CD274 mRNA inhibited human CD274 mRNA expression in HDI mice, as determined by a reduction in the amount of human CD274 mRNA expression in liver samples from HDI mice treated with GalNAc-conjugated CD274 oligonucleotides relative to control HDI mice treated with only PBS. Based on the mRNA knockdown, the best five from FIG. 16A and best two from FIG. 16B were selected for further dose response studies (Table 7 and depicted in FIG. 17).

TABLE 7
GalNAc-Conjugated Human CD274 RNAi
Oligonucleotides for Dose Study

| | Unmodified | Unmodified | Modified | Modified |
|---|---|---|---|---|
| | Sense | Antisense | Sense | Antisense |
| | Strand | strand | Strand | strand |
| CD274-0094 | 484 | 725 | 966 | 1002 |
| CD274-0097 | 486 | 727 | 968 | 1004 |
| CD274-0098 | 487 | 728 | 969 | 1005 |
| CD274-0100 | 488 | 729 | 970 | 1006 |
| CD274-0102 | 489 | 730 | 971 | 1007 |
| CD274-0193 | 491 | 732 | 973 | 1009 |
| CD274-0274 | 502 | 743 | 984 | 1020 |

[1389] These subsets of GalNAc-conjugated CD274 oligonucleotides (CD274-094, 097, 098, 100, 102, 193 and 274) were further validated in two dose response studies (FIGS. 18 and 19). In the first study, seven GalNAc-conjugated CD274 oligonucleotides (CD274-094, 097, 098, 100, 102, 193 and 274) were tested. Mice were hydrodynamically injected as described above and treated with 0.3 mg/kg or 1 mg/kg of oligonucleotide. Livers were collected after 20 hours, and human CD274 expression was measured to determine a potent dose (FIG. 18). Then a second dose response study was run using six oligonucleotides (CD274-094, 097, 098, 102, 193 and 274) at 0.3 and 0.1 mg/kg dose levels (FIG. 19). A dose of 0.1 mg/kg was capable of reducing CD274 mRNA by about 50%, thereby identifying 3 potential GalNAc-conjugated CD274 oligonucleotides for inhibiting CD274 expression in liver. The best two sequences from FIG. 19 were further evaluated in in vitro cell line/immune cell culture settings to evaluate efficacy.

### Example 11: Evaluating the Intrinsic Potency of Two Selected CD274 Oligonucleotides

[1390] To evaluate the intrinsic potency of GalNAc-CD274-094 and GalNAc-CD274-098, the oligonucleotides were tested in the non-small cell lung cancer H460 cell line. H460 cells were treated for 24 hours with a series of concentrations of the GalNAc-conjugated CD274 oligonucleotides using lipofectamine as transfection agent. The percent (%) remaining mRNA was normalized using an endogenously expressed control gene PP1ACD274 oligonucleotides demonstrated similar IC₅₀ suggesting that the potencies are very similar (FIG. 20). These two oligonucleotides were then tested in human primary immune cell culture as these cells are the target cells in human patients Monocytes were first treated with M-CSF for 6 days for differentiation followed by polarization with IL-10 cytokine for 1 day to convert them into suppressive macrophages (M2 phenotype) and treated with both GalNAc-conjugated CD274 oligonucleotides for 72 hours with a series of dose levels (0.0032 nM, 0.16 nM, 0.08 nM, 0.04 nM, 2 nM, 10 nM, and 50 nM). The IC₅₀s were almost identical although they are slightly better than what were found in H460 cell line (FIG. 21). The monocytes were also converted into DCs after 7-day incubation in media with GM-CSF and IL-4 cytokines. Since CD274 expressed by the DCs identified as the key component that play a role in mediating immune response, the selected sequences were tested in these differentiated dendritic cells (FIG. 22). GalNAc-CD274-098 demonstrated dose-dependent knockdown while CD274-094 did not (FIG. 22) in these cells. To evaluate if the CD274 knockdown mediates any immune activation which is usually the case when DCs get activated in TDLN, cytokine levels were measured in the supernatant collected from the in vitro culture plates using MSD V-plex assay kit. GalNAc-CD274-098 mediated slightly higher levels of IFN-7 compared to GalNac-CD274-094 upon CD274 inhibition (FIG. 23), correlating to RNAi potency rank order observed in FIG. 22. Demonstration of IFN-7 release in human dendritic cells after treatment confirms targeting of the endogenous gene in the target cell type. Together this data demonstrates that the intrinsic potency of the CD274 oligonucleotides could be confirmed by measuring the efficiency of the sequence to reduce CD274 expression and the activating immune responses upon CD274 inhibition in the target cell type.

### Example 12: Using SAR to Identify a GalXC Lipid Conjugate Favorable for Delivery of siRNA to the Tumor Microenvironment and Tumor Draining Lymph Nodes

[1391] To identify a lipid conjugate with the most favorable properties to deliver payload and mediate target knockdown with the highest selectivity to myeloid cells in TME, a series of lipid conjugated oligonucleotides (C16, C18, C22 and C24) were generated (Table 8). To investigate these test articles, Pan02 murine pancreatic tumor cells were implanted in nude mice. When the tumors reached a volume of 300-400 mm³, the mice were randomized into groups and treated with either a single dose of PBS or a GalXC lipid conjugate (C16, C18, C22 and C24) at 25 mg/kg. Target knockdown was assessed on day 3 in bulk tumor and in liver (FIGS. 24A and 24B) to identify a GalXC lipid a conjugate with selectivity towards the target tissue (MDSCs) as compared to normal liver tissue. On day 3 post dose, Aldh2 mRNA levels in the tumors of all the treatment groups were decreased to a similar degree. There was a trend observed in the Aldh2 levels in livers of GalXC-ALDH2-lipid conjugate groups of a correlation of higher lipid acyl chain length with lower target knockdown (C24>C22>C18>C16), suggesting that these conjugates may use different mechanisms to traffic to TME versus Liver. Since the shorter lipid acyl chain conjugates C16 and C18 seem to be more liver sparing without compromising TME activity, as compared to longer acyl chain conjugates C22 and C24, the C16/C18 lipid conjugates were further explored in a separate study to further characterize their activity. Pan02 tumor bearing mice were treated with a single subcutaneous dose of GalXC-ALDH2-C16 or GalXC-ALDH-C18 at 25 mg/kg, or PBS and activity was monitored in bulk tumor tissue and TdLN on days 7 and 14. As shown in FIGS. 24C and 24D, the C18 conjugate outperformed C16 in target knockdown in bulk tumor at both time points. Although both test articles showed similar activity in TdLN on day 7, the C16 conjugate mediated activity was significantly reduced on day14 while C18 mediated activity was maintained.

TABLE 8
GalXC-lipid conjugate ALDH2 Tool Molecules

| | | Sense | Antisense | |
|---|---|---|---|---|
| | | Strand | strand | |
| | Sequence | SEQ | SEQ | |
| Oligo | Type | ID NO | ID NO | Conjugate |
| GalXC-ALDH2-C16 | Unmodified | 1043 | 1044 | C16 |
| | Modified | 1045 | 1046 | C16 |
| GalXC-ALDH2-C18 | Unmodified | 1043 | 1044 | C18 |
| | Modified | 1047 | 1046 | C18 |
| GalXC-ALDH2-C22 | Unmodified | 1043 | 1044 | C22 |
| | Modified | 1048 | 1046 | C22 |
| GalXC-ALDH2-C24 | Unmodified | 1043 | 1044 | C24 |
| | Modified | 1049 | 1046 | C24 |

### Example 13: CD274 Oligonucleotides for Treatment of Disease

[1392] To investigate efficacy of CD274 RNAi oligonucleotides with ligand conjugation, subjects are administered a CD274 RNAi oligonucleotide conjugated to a hydrocarbon chain (e.g., a hydrocarbon chain depicted in FIG. 1B). Specifically, subjects are administered a CD274 RNAi oligonucleotide (depicted in FIG. 25) wherein the sense strand comprises SEQ ID NO: 1050 and the antisense strand comprises SEQ ID NO: 1005.

SEQUENCE LISTING

| | | | SEQ ID |
|---|---|---|---|
| Construct | Description | Sequence | NO |
| CD274- | 19-mer Sense | AGAAAGAUGAGGAUAUUUG | 1 |
| 0088 | Strand | | |
| CD274- | 19-mer Sense | AUGAGGAUAUUUGCUGUCU | 2 |
| 0094 | Strand | | |
| CD274- | 19-mer Sense | AGGAUAUUUGCUGUCUUUA | 4 |
| 0097 | Strand | | |
| CD274- | 19-mer Sense | GGAUAUUUGCUGUCUUUAU | 5 |
| 0098 | Strand | | |
| CD274- | 19-mer Sense | AUAUUUGCUGUCUUUAUAU | 6 |
| 0100 | Strand | | |
| CD274- | 19-mer Sense | AUUUGCUGUCUUUAUAUUC | 7 |
| 0102 | Strand | | |
| CD274- | 19-mer Sense | AGGACCUAUAUGUGGUAGA | 8 |
| 0167 | Strand | | |
| CD274- | 19-mer Sense | AGCAAUAUGACAAUUGAAU | 9 |
| 0193 | Strand | | |
| CD274- | 19-mer Sense | GCAAUAUGACAAUUGAAUG | 10 |
| 0194 | Strand | | |
| CD274- | 19-mer Sense | AUAUGACAAUUGAAUGCAA | 11 |
| 0197 | Strand | | |
| CD274- | 19-mer Sense | UGACAAUUGAAUGCAAAUU | 12 |
| 0200 | Strand | | |
| CD274- | 19-mer Sense | AAUUGAAUGCAAAUUCCCA | 13 |
| 0204 | Strand | | |
| CD274- | 19-mer Sense | CCCAGUAGAAAAACAAUUA | 14 |
| 0219 | Strand | | |
| CD274- | 19-mer Sense | AGUAGAAAAACAAUUAGAC | 15 |
| 0222 | Strand | | |
| CD274- | 19-mer Sense | AGAAAAACAAUUAGACCUG | 16 |
| 0225 | Strand | | |
| CD274- | 19-mer Sense | AUGGAGGAUAAGAACAUUA | 17 |
| 0268 | Strand | | |
| CD274- | 19-mer Sense | UGGAGGAUAAGAACAUUAU | 18 |
| 0269 | Strand | | |
| CD274- | 19-mer Sense | GAGGAUAAGAACAUUAUUC | 19 |
| 0271 | Strand | | |
| CD274- | 19-mer Sense | GAUAAGAACAUUAUUCAAU | 20 |
| 0274 | Strand | | |
| CD274- | 19-mer Sense | AUAAGAACAUUAUUCAAUU | 21 |
| 0275 | Strand | | |
| CD274- | 19-mer Sense | AAGAACAUUAUUCAAUUUG | 22 |
| 0277 | Strand | | |
| CD274- | 19-mer Sense | CAUUAUUCAAUUUGUGCAU | 23 |
| 0282 | Strand | | |
| CD274- | 19-mer Sense | AUUAUUCAAUUUGUGCAUG | 24 |
| 0283 | Strand | | |
| CD274- | 19-mer Sense | AUCACAGAUGUGAAAUUGC | 25 |
| 0394 | Strand | | |
| CD274- | 19-mer Sense | AGAUGUGAAAUUGCAGGAU | 26 |
| 0399 | Strand | | |
| CD274- | 19-mer Sense | CAGUCACCUCUGAACAUGA | 27 |
| 0530 | Strand | | |
| CD274- | 19-mer Sense | AGUCACCUCUGAACAUGAA | 28 |
| 0531 | Strand | | |
| CD274- | 19-mer Sense | AGGAGAAGCUUUUCAAUGU | 29 |
| 0653 | Strand | | |
| CD274- | 19-mer Sense | ACCAGCACACUGAGAAUCA | 30 |
| 0673 | Strand | | |
| CD274- | 19-mer Sense | CACAACAACUAAUGAGAUU | 31 |
| 0693 | Strand | | |
| CD274- | 19-mer Sense | ACAACUAAUGAGAUUUUCU | 32 |
| 0697 | Strand | | |
| CD274- | 19-mer Sense | ACUAAUGAGAUUUUCUACU | 33 |
| 0700 | Strand | | |
| CD274- | 19-mer Sense | CUAAUGAGAUUUUCUACUG | 34 |
| 0701 | Strand | | |
| CD274- | 19-mer Sense | AGGAAAACCAUACAGCUGA | 35 |
| 0743 | Strand | | |
| CD274- | 19-mer Sense | AAAACCAUACAGCUGAAUU | 36 |
| 0746 | Strand | | |
| CD274- | 19-mer Sense | UGAGGAUAUUUGCUGUCUU | 37 |
| 0095 | Strand | | |
| CD274- | 19-mer Sense | GAUAUUUGCUGUCUUUAUA | 38 |
| 0099 | Strand | | |
| CD274- | 19-mer Sense | UUUGCUGUCUUUAUAUUCA | 39 |
| 0103 | Strand | | |
| CD274- | 19-mer Sense | CAAUAUGACAAUUGAAUGC | 40 |
| 0195 | Strand | | |
| CD274- | 19-mer Sense | AAUAUGACAAUUGAAUGCA | 41 |
| 0196 | Strand | | |
| CD274- | 19-mer Sense | UAUGACAAUUGAAUGCAAA | 42 |
| 0198 | Strand | | |
| CD274- | 19-mer Sense | AUGACAAUUGAAUGCAAAU | 43 |
| 0199 | Strand | | |
| CD274- | 19-mer Sense | GACAAUUGAAUGCAAAUUC | 44 |
| 0201 | Strand | | |
| CD274- | 19-mer Sense | ACAAUUGAAUGCAAAUUCC | 45 |
| 0202 | Strand | | |
| CD274- | 19-mer Sense | UGAAUGCAAAUUCCCAGUA | 46 |
| 0207 | Strand | | |
| CD274- | 19-mer Sense | CAGUAGAAAAACAAUUAGA | 47 |
| 0221 | Strand | | |
| CD274- | 19-mer Sense | CUGCACUAAUUGUCUAUUG | 48 |
| 0245 | Strand | | |
| CD274- | 19-mer Sense | CACUAAUUGUCUAUUGGGA | 49 |
| 0248 | Strand | | |
| CD274- | 19-mer Sense | ACUAAUUGUCUAUUGGGAA | 50 |
| 0249 | Strand | | |
| CD274- | 19-mer Sense | GAAAUGGAGGAUAAGAACA | 51 |
| 0265 | Strand | | |
| CD274- | 19-mer Sense | AAAUGGAGGAUAAGAACAU | 52 |
| 0266 | Strand | | |
| CD274- | 19-mer Sense | AAUGGAGGAUAAGAACAUU | 53 |
| 0267 | Strand | | |
| CD274- | 19-mer Sense | GGAGGAUAAGAACAUUAUU | 54 |
| 0270 | Strand | | |
| CD274- | 19-mer Sense | AGGAUAAGAACAUUAUUCA | 55 |
| 0272 | Strand | | |
| CD274- | 19-mer Sense | GGAUAAGAACAUUAUUCAA | 56 |
| 0273 | Strand | | |
| CD274- | 19-mer Sense | UAAGAACAUUAUUCAAUUU | 57 |
| 0276 | Strand | | |
| CD274- | 19-mer Sense | AGAACAUUAUUCAAUUUGU | 58 |
| 0278 | Strand | | |
| CD274- | 19-mer Sense | GAACAUUAUUCAAUUUGUG | 59 |
| 0279 | Strand | | |
| CD274- | 19-mer Sense | AACAUUAUUCAAUUUGUGC | 60 |
| 0280 | Strand | | |
| CD274- | 19-mer Sense | ACAUUAUUCAAUUUGUGCA | 61 |
| 0281 | Strand | | |
| CD274- | 19-mer Sense | UAUUCAAUUUGUGCAUGGA | 62 |
| 0285 | Strand | | |
| CD274- | 19-mer Sense | AGAGGAAGACCUGAAGGUU | 63 |
| 0303 | Strand | | |
| CD274- | 19-mer Sense | AGGAAGACCUGAAGGUUCA | 64 |
| 0305 | Strand | | |
| CD274- | 19-mer Sense | AAGACCUGAAGGUUCAGCA | 65 |
| 0308 | Strand | | |
| CD274- | 19-mer Sense | AGACCUGAAGGUUCAGCAU | 66 |
| 0309 | Strand | | |
| CD274- | 19-mer Sense | GACCUGAAGGUUCAGCAUA | 67 |
| 0310 | Strand | | |
| CD274- | 19-mer Sense | CCUGAAGGUUCAGCAUAGU | 68 |
| 0312 | Strand | | |
| CD274- | 19-mer Sense | CUGAAGGUUCAGCAUAGUA | 69 |
| 0313 | Strand | | |
| CD274- | 19-mer Sense | AGAUCACAGAUGUGAAAUU | 70 |
| 0392 | Strand | | |
| CD274- | 19-mer Sense | UCACAGAUGUGAAAUUGCA | 71 |
| 0395 | Strand | | |
| CD274- | 19-mer Sense | CAGAUGUGAAAUUGCAGGA | 72 |
| 0398 | Strand | | |
| CD274- | 19-mer Sense | ACAAAAUCAACCAAAGAAU | 73 |
| 0497 | Strand | | |
| CD274- | 19-mer Sense | AAAAUCAACCAAAGAAUUU | 74 |
| 0499 | Strand | | |
| CD274- | 19-mer Sense | AAAUCAACCAAAGAAUUUU | 75 |
| 0500 | Strand | | |
| CD274- | 19-mer Sense | AAUCAACCAAAGAAUUUUG | 76 |
| 0501 | Strand | | |
| CD274- | 19-mer Sense | AUCAACCAAAGAAUUUUGG | 77 |
| 0502 | Strand | | |
| CD274- | 19-mer Sense | CAACCAAAGAAUUUUGGUU | 78 |
| 0504 | Strand | | |
| CD274- | 19-mer Sense | AACCAAAGAAUUUUGGUUG | 79 |
| 0505 | Strand | | |
| CD274- | 19-mer Sense | ACCAAAGAAUUUUGGUUGU | 80 |
| 0506 | Strand | | |
| CD274- | 19-mer Sense | CCAAAGAAUUUUGGUUGUG | 81 |
| 0507 | Strand | | |
| CD274- | 19-mer Sense | AAAGAAUUUUGGUUGUGGA | 82 |
| 0509 | Strand | | |
| CD274- | 19-mer Sense | AAGAAUUUUGGUUGUGGAU | 83 |
| 0510 | Strand | | |
| CD274- | 19-mer Sense | AGAAUUUUGGUUGUGGAUC | 84 |
| 0511 | Strand | | |
| CD274- | 19-mer Sense | AAUUUUGGUUGUGGAUCCA | 85 |
| 0513 | Strand | | |
| CD274- | 19-mer Sense | ACCUCUGAACAUGAACUGA | 86 |
| 0535 | Strand | | |
| CD274- | 19-mer Sense | CUCUGAACAUGAACUGACA | 87 |
| 0537 | Strand | | |
| CD274- | 19-mer Sense | AACAUGAACUGACAUGUCA | 88 |
| 0542 | Strand | | |
| CD274- | 19-mer Sense | GAAGUCAUCUGGACAAGCA | 89 |
| 0583 | Strand | | |
| CD274- | 19-mer Sense | GACAAGCAGUGACCAUCAA | 90 |
| 0594 | Strand | | |
| CD274- | 19-mer Sense | AGUGACCAUCAAGUCCUGA | 91 |
| 0601 | Strand | | |
| CD274- | 19-mer Sense | GGAGAAGCUUUUCAAUGUG | 92 |
| 0654 | Strand | | |
| CD274- | 19-mer Sense | GAGAAGCUUUUCAAUGUGA | 93 |
| 0655 | Strand | | |
| CD274- | 19-mer Sense | AGAAGCUUUUCAAUGUGAC | 94 |
| 0656 | Strand | | |
| CD274- | 19-mer Sense | AAGCUUUUCAAUGUGACCA | 95 |
| 0658 | Strand | | |
| CD274- | 19-mer Sense | CUUUUCAAUGUGACCAGCA | 96 |
| 0661 | Strand | | |
| CD274- | 19-mer Sense | AAUGUGACCAGCACACUGA | 97 |
| 0667 | Strand | | |
| CD274- | 19-mer Sense | AGCACACUGAGAAUCAACA | 98 |
| 0676 | Strand | | |
| CD274- | 19-mer Sense | ACACUGAGAAUCAACACAA | 99 |
| 0679 | Strand | | |
| CD274- | 19-mer Sense | ACUGAGAAUCAACACAACA | 100 |
| 0681 | Strand | | |
| CD274- | 19-mer Sense | AGAAUCAACACAACAACUA | 101 |
| 0685 | Strand | | |
| CD274- | 19-mer Sense | ACACAACAACUAAUGAGAU | 102 |
| 0692 | Strand | | |
| CD274- | 19-mer Sense | CAACAACUAAUGAGAUUUU | 103 |
| 0695 | Strand | | |
| CD274- | 19-mer Sense | AACAACUAAUGAGAUUUUC | 104 |
| 0696 | Strand | | |
| CD274- | 19-mer Sense | CAACUAAUGAGAUUUUCUA | 105 |
| 0698 | Strand | | |
| CD274- | 19-mer Sense | AAUGAGAUUUUCUACUGCA | 106 |
| 0703 | Strand | | |
| CD274- | 19-mer Sense | AUUUUCUACUGCACUUUUA | 107 |
| 0709 | Strand | | |
| CD274- | 19-mer Sense | GAAAACCAUACAGCUGAAU | 108 |
| 0745 | Strand | | |
| CD274- | 19-mer Sense | ACCAUACAGCUGAAUUGGU | 109 |
| 0749 | Strand | | |
| CD274- | 19-mer Sense | AUACAGCUGAAUUGGUCAU | 110 |
| 0752 | Strand | | |
| CD274- | 19-mer Sense | AUGAAAGGACUCACUUGGU | 111 |
| 0800 | Strand | | |
| CD274- | 19-mer Sense | AAGGACUCACUUGGUAAUU | 112 |
| 0804 | Strand | | |
| CD274- | 19-mer Sense | GGUGUAGCACUGACAUUCA | 113 |
| 0847 | Strand | | |
| CD274- | 19-mer Sense | AGCACUGACAUUCAUCUUC | 114 |
| 0852 | Strand | | |
| CD274- | 19-mer Sense | AUGAUGGAUGUGAAAAAAU | 115 |
| 0889 | Strand | | |
| CD274- | 19-mer Sense | GGAGACCUUGAUACUUUCA | 116 |
| 1172 | Strand | | |
| CD274- | 19-mer Sense | GAGACCUUGAUACUUUCAA | 117 |
| 1173 | Strand | | |
| CD274- | 19-mer Sense | AGACCUUGAUACUUUCAAA | 118 |
| 1174 | Strand | | |
| CD274- | 19-mer Sense | ACCUUGAUACUUUCAAAUG | 119 |
| 1176 | Strand | | |
| CD274- | 19-mer Sense | CUUGAUACUUUCAAAUGCC | 120 |
| 1178 | Strand | | |
| CD274- | 19-mer Sense | GAAAGGAUACUUCUGAACA | 121 |
| 1227 | Strand | | |
| CD274- | 19-mer Sense | GGAUACUUCUGAACAAGGA | 122 |
| 1231 | Strand | | |
| CD274- | 19-mer Sense | CUAUUUAUUUUGAGUCUGU | 123 |
| 1423 | Strand | | |
| CD274- | 19-mer Sense | AUUUAUUUUGAGUCUGUGA | 124 |
| 1425 | Strand | | |
| CD274- | 19-mer Sense | UGAGUGUGGUUGUGAAUGA | 125 |
| 1459 | Strand | | |
| CD274- | 19-mer Sense | GAGUGUGGUUGUGAAUGAU | 126 |
| 1460 | Strand | | |
| CD274- | 19-mer Sense | AGUGUGGUUGUGAAUGAUU | 127 |
| 1461 | Strand | | |
| CD274- | 19-mer Sense | GUGUGGUUGUGAAUGAUUU | 128 |
| 1462 | Strand | | |
| CD274- | 19-mer Sense | UGUGGUUGUGAAUGAUUUC | 129 |
| 1463 | Strand | | |
| CD274- | 19-mer Sense | GUGGUUGUGAAUGAUUUCU | 130 |
| 1464 | Strand | | |
| CD274- | 19-mer Sense | UGGUUGUGAAUGAUUUCUU | 131 |
| 1465 | Strand | | |
| CD274- | 19-mer Sense | GUUGUGAAUGAUUUCUUUU | 132 |
| 1467 | Strand | | |
| CD274- | 19-mer Sense | UGUGAAUGAUUUCUUUUGA | 133 |
| 1469 | Strand | | |
| CD274- | 19-mer Sense | GUGAAUGAUUUCUUUUGAA | 134 |
| 1470 | Strand | | |
| CD274- | 19-mer Sense | AAUGAUUUCUUUUGAAGAU | 135 |
| 1473 | Strand | | |
| CD274- | 19-mer Sense | AUGAUUUCUUUUGAAGAUA | 136 |
| 1474 | Strand | | |
| CD274- | 19-mer Sense | CUUUUGAAGAUAUAUUGUA | 137 |
| 1481 | Strand | | |
| CD274- | 19-mer Sense | UUGAAGAUAUAUUGUAGUA | 138 |
| 1484 | Strand | | |
| CD274- | 19-mer Sense | GAAGAUAUAUUGUAGUAGA | 139 |
| 1486 | Strand | | |
| CD274- | 19-mer Sense | AGUAGAUGUUACAAUUUUG | 140 |
| 1499 | Strand | | |
| CD274- | 19-mer Sense | GUAGAUGUUACAAUUUUGU | 141 |
| 1500 | Strand | | |
| CD274- | 19-mer Sense | AAUGAUUUGCUCACAUCUA | 142 |
| 1541 | Strand | | |
| CD274- | 19-mer Sense | AAAACAUGGAGUAUUUGUA | 143 |
| 1562 | Strand | | |
| CD274- | 19-mer Sense | CAAGUAUACAUUGGAAGCA | 144 |
| 1606 | Strand | | |
| CD274- | 19-mer Sense | AAGUAUACAUUGGAAGCAU | 145 |
| 1607 | Strand | | |
| CD274- | 19-mer Sense | AGGAUGUCACCUUUAUUUA | 146 |
| 1649 | Strand | | |
| CD274- | 19-mer Sense | CUGUUCCAUUUAAAUAUCA | 147 |
| 1728 | Strand | | |
| CD274- | 19-mer Sense | UGUAACCACCCUGUUGUGA | 148 |
| 1794 | Strand | | |
| CD274- | 19-mer Sense | GUAACCACCCUGUUGUGAU | 149 |
| 1795 | Strand | | |
| CD274- | 19-mer Sense | GUUGUGAUAACCACUAUUA | 150 |
| 1806 | Strand | | |
| CD274- | 19-mer Sense | UUGUGAUAACCACUAUUAU | 151 |
| 1807 | Strand | | |
| CD274- | 19-mer Sense | UGUGAUAACCACUAUUAUU | 152 |
| 1808 | Strand | | |
| CD274- | 19-mer Sense | GUGAUAACCACUAUUAUUU | 153 |
| 1809 | Strand | | |
| CD274- | 19-mer Sense | UGAUAACCACUAUUAUUUU | 154 |
| 1810 | Strand | | |
| CD274- | 19-mer Sense | GAUAACCACUAUUAUUUUA | 155 |
| 1811 | Strand | | |
| CD274- | 19-mer Sense | AUAACCACUAUUAUUUUAC | 156 |
| 1812 | Strand | | |
| CD274- | 19-mer Sense | CCACUGUCCUUUUAUAAUA | 157 |
| 1906 | Strand | | |
| CD274- | 19-mer Sense | CACUGUCCUUUUAUAAUAC | 158 |
| 1907 | Strand | | |
| CD274- | 19-mer Sense | ACUGUCCUUUUAUAAUACA | 159 |
| 1908 | Strand | | |
| CD274- | 19-mer Sense | CUGUCCUUUUAUAAUACAA | 160 |
| 1909 | Strand | | |
| CD274- | 19-mer Sense | UGUCCUUUUAUAAUACAAU | 161 |
| 1910 | Strand | | |
| CD274- | 19-mer Sense | CCUUUUAUAAUACAAUUUA | 162 |
| 1913 | Strand | | |
| CD274- | 19-mer Sense | UUUUAUAAUACAAUUUACA | 163 |
| 1915 | Strand | | |
| CD274- | 19-mer Sense | AUAAUACAAUUUACAGCUA | 164 |
| 1919 | Strand | | |
| CD274- | 19-mer Sense | ACAGCUAUAUUUUACUUUA | 165 |
| 1931 | Strand | | |
| CD274- | 19-mer Sense | CUAUAUUUUACUUUAAGCA | 166 |
| 1935 | Strand | | |
| CD274- | 19-mer Sense | AUAUUUUACUUUAAGCAAU | 167 |
| 1937 | Strand | | |
| CD274- | 19-mer Sense | AUUGAAUCUACAGAUGUGA | 168 |
| 2014 | Strand | | |
| CD274- | 19-mer Sense | GAAAAUGUAUUAUUACAAU | 169 |
| 2088 | Strand | | |
| CD274- | 19-mer Sense | AUAAUCAGAGUAAUUUUCA | 170 |
| 2221 | Strand | | |
| CD274- | 19-mer Sense | UCAGAGUAAUUUUCAUUUA | 171 |
| 2225 | Strand | | |
| CD274- | 19-mer Sense | AGAGUAAUUUUCAUUUACA | 172 |
| 2227 | Strand | | |
| CD274- | 19-mer Sense | GAGUAAUUUUCAUUUACAA | 173 |
| 2228 | Strand | | |
| CD274- | 19-mer Sense | AGUAAUUUUCAUUUACAAA | 174 |
| 2229 | Strand | | |
| CD274- | 19-mer Sense | UAAUUUUCAUUUACAAAGA | 175 |
| 2231 | Strand | | |
| CD274- | 19-mer Sense | AUUUUCAUUUACAAAGAGA | 176 |
| 2233 | Strand | | |
| CD274- | 19-mer Sense | AAAAUAACCCUGAAAAAUA | 177 |
| 2263 | Strand | | |
| CD274- | 19-mer Sense | AUAACCCUGAAAAAUAACA | 178 |
| 2266 | Strand | | |
| CD274- | 19-mer Sense | AUAUAAUCUAAUGCUUGUU | 179 |
| 2333 | Strand | | |
| CD274- | 19-mer Sense | AUAAUCUAAUGCUUGUUUA | 180 |
| 2335 | Strand | | |
| CD274- | 19-mer Sense | AAUCUAAUGCUUGUUUAUA | 181 |
| 2337 | Strand | | |
| CD274- | 19-mer Sense | AUCUAAUGCUUGUUUAUAU | 182 |
| 2338 | Strand | | |
| CD274- | 19-mer Sense | UCUAAUGCUUGUUUAUAUA | 183 |
| 2339 | Strand | | |
| CD274- | 19-mer Sense | UAAUGCUUGUUUAUAUAGU | 184 |
| 2341 | Strand | | |
| CD274- | 19-mer Sense | AUGCUUGUUUAUAUAGUGU | 185 |
| 2343 | Strand | | |
| CD274- | 19-mer Sense | CUGGUAUUGUUUAACAGUU | 186 |
| 2362 | Strand | | |
| CD274- | 19-mer Sense | UGGUAUUGUUUAACAGUUC | 187 |
| 2363 | Strand | | |
| CD274- | 19-mer Sense | AAUUUUAAAUUCAUACCUU | 188 |
| 2407 | Strand | | |
| CD274- | 19-mer Sense | AGUCUACAUUUGGAAAUGU | 189 |
| 2556 | Strand | | |
| CD274- | 19-mer Sense | GUCUACAUUUGGAAAUGUA | 190 |
| 2557 | Strand | | |
| CD274- | 19-mer Sense | ACAUUUGGAAAUGUAUGUU | 191 |
| 2561 | Strand | | |
| CD274- | 19-mer Sense | CAUUUGGAAAUGUAUGUUA | 192 |
| 2562 | Strand | | |
| CD274- | 19-mer Sense | AUUUGGAAAUGUAUGUUAA | 193 |
| 2563 | Strand | | |
| CD274- | 19-mer Sense | UUGGAAAUGUAUGUUAAAA | 194 |
| 2565 | Strand | | |
| CD274- | 19-mer Sense | GAAAUGUAUGUUAAAAGCA | 195 |
| 2568 | Strand | | |
| CD274- | 19-mer Sense | CUGUGUACUUUGCUAUUUU | 196 |
| 2634 | Strand | | |
| CD274- | 19-mer Sense | GUGUACUUUGCUAUUUUUA | 197 |
| 2636 | Strand | | |
| CD274- | 19-mer Sense | UGUACUUUGCUAUUUUUAU | 198 |
| 2637 | Strand | | |
| CD274- | 19-mer Sense | ACUUUGCUAUUUUUAUUUA | 199 |
| 2640 | Strand | | |
| CD274- | 19-mer Sense | AUAUAGCAGAUGGAAUGAA | 200 |
| 2673 | Strand | | |
| CD274- | 19-mer Sense | GCAGAUGGAAUGAAUUUGA | 201 |
| 2678 | Strand | | |
| CD274- | 19-mer Sense | CAGAUGGAAUGAAUUUGAA | 202 |
| 2679 | Strand | | |
| CD274- | 19-mer Sense | AUAUACAUUUAGACAACCA | 203 |
| 2801 | Strand | | |
| CD274- | 19-mer Sense | AACCACCAUUUGUUAAGUA | 204 |
| 2815 | Strand | | |
| CD274- | 19-mer Sense | ACCAUUUGUUAAGUAUUUG | 205 |
| 2819 | Strand | | |
| CD274- | 19-mer Sense | AAAAGCAAUCUUAUUAUUA | 206 |
| 2924 | Strand | | |
| CD274- | 19-mer Sense | UAUUAUUAACUCUGUAUGA | 207 |
| 2935 | Strand | | |
| CD274- | 19-mer Sense | AUUAUUAACUCUGUAUGAC | 208 |
| 2936 | Strand | | |
| CD274- | 19-mer Sense | UUAUUAACUCUGUAUGACA | 209 |
| 2937 | Strand | | |
| CD274- | 19-mer Sense | AUUAACUCUGUAUGACAGA | 210 |
| 2939 | Strand | | |
| CD274- | 19-mer Sense | AGUAUAAACUUCACUUUGA | 211 |
| 2994 | Strand | | |
| CD274- | 19-mer Sense | CUGUACUUGCAAAAUCACA | 212 |
| 3015 | Strand | | |
| CD274- | 19-mer Sense | ACUUGCAAAAUCACAUUUU | 213 |
| 3019 | Strand | | |
| CD274- | 19-mer Sense | CCUCAUUCGUUGUGCUUGA | 214 |
| 3094 | Strand | | |
| CD274- | 19-mer Sense | CUCAUUCGUUGUGCUUGAA | 215 |
| 3095 | Strand | | |
| CD274- | 19-mer Sense | CUUGUGUUAUCUGUUUGUA | 216 |
| 3305 | Strand | | |
| CD274- | 19-mer Sense | UUGUGUUAUCUGUUUGUAC | 217 |
| 3306 | Strand | | |
| CD274- | 19-mer Sense | UGUGUUAUCUGUUUGUACA | 218 |
| 3307 | Strand | | |
| CD274- | 19-mer Sense | GUGUUAUCUGUUUGUACAU | 219 |
| 3308 | Strand | | |
| CD274- | 19-mer Sense | GUUAUCUGUUUGUACAUGU | 220 |
| 3310 | Strand | | |
| CD274- | 19-mer Sense | UUGUACAUGUGCAUUUGUA | 221 |
| 3319 | Strand | | |
| CD274- | 19-mer Sense | AUGUGCAUUUGUACAGUAA | 222 |
| 3325 | Strand | | |
| CD274- | 19-mer Sense | GUGUUCUUUGUGUGAAUUA | 223 |
| 3355 | Strand | | |
| CD274- | 19-mer Sense | GUUCUUUGUGUGAAUUACA | 224 |
| 3357 | Strand | | |
| CD274- | 19-mer Sense | UUGUGGUGUUGGAUUUGUA | 225 |
| 3441 | Strand | | |
| CD274- | 19-mer Sense | AUUCUGCAUUUGAUUGUCA | 226 |
| 3522 | Strand | | |
| CD274- | 19-mer Sense | CAUUUGAUUGUCACUUUUU | 227 |
| 3528 | Strand | | |
| CD274- | 19-mer Sense | UUGAUUGUCACUUUUUGUA | 228 |
| 3531 | Strand | | |
| CD274- | 19-mer Sense | UGAUUGUCACUUUUUGUAC | 229 |
| 3532 | Strand | | |
| CD274- | 19-mer Sense | AUUGUCACUUUUUGUACCU | 230 |
| 3534 | Strand | | |
| CD274- | 19-mer Sense | CUUUUUGUACCUGCAUUAA | 231 |
| 3541 | Strand | | |
| CD274- | 19-mer Sense | UUUUUGUACCUGCAUUAAU | 232 |
| 3542 | Strand | | |
| CD274- | 19-mer Sense | UUGUACCUGCAUUAAUUUA | 233 |
| 3545 | Strand | | |
| CD274- | 19-mer Sense | UGUACCUGCAUUAAUUUAA | 234 |
| 3546 | Strand | | |
| CD274- | 19-mer Sense | AUAUUCUUAUUUAUUUUGU | 235 |
| 3569 | Strand | | |
| CD274- | 19-mer Sense | AUUUAUUUUGUUACUUGGU | 236 |
| 3577 | Strand | | |
| CD274- | 19-mer Sense | UUUAUUUUGUUACUUGGUA | 237 |
| 3578 | Strand | | |
| CD274- | 19-mer Sense | UAUUUUGUUACUUGGUACA | 238 |
| 3580 | Strand | | |
| CD274- | 19-mer Sense | AUGUCCAUUUUCUUGUUUA | 239 |
| 3604 | Strand | | |
| CD274- | 19-mer Sense | AUUUUCUUGUUUAUUUUGU | 240 |
| 3610 | Strand | | |
| CD274- | 19-mer Sense | AUUUUGUGUUUAAUAAAAU | 241 |
| 3622 | Strand | | |
| CD274- | 19-mer Anti- | UCAAAUAUCCUCAUCUUUC | 242 |
| 0088 | sense Strand | | |
| CD274- | 19-mer Anti- | UAGACAGCAAAUAUCCUCA | 243 |
| 0094 | sense Strand | | |
| CD274- | 19-mer Anti- | UUAAAGACAGCAAAUAUCC | 245 |
| 0097 | sense Strand | | |
| CD274- | 19-mer Anti- | UAUAAAGACAGCAAAUAUC | 246 |
| 0098 | sense Strand | | |
| CD274- | 19-mer Anti- | UAUAUAAAGACAGCAAAUA | 247 |
| 0100 | sense Strand | | |
| CD274- | 19-mer Anti- | UGAAUAUAAAGACAGCAAA | 248 |
| 0102 | sense Strand | | |
| CD274- | 19-mer Anti- | UUCUACCACAUAUAGGUCC | 249 |
| 0167 | sense Strand | | |
| CD274- | 19-mer Anti- | UAUUCAAUUGUCAUAUUGC | 250 |
| 0193 | sense Strand | | |
| CD274- | 19-mer Anti- | UCAUUCAAUUGUCAUAUUG | 251 |
| 0194 | sense Strand | | |
| CD274- | 19-mer Anti- | UUUGCAUUCAAUUGUCAUA | 252 |
| 0197 | sense Strand | | |
| CD274- | 19-mer Anti- | UAAUUUGCAUUCAAUUGUC | 253 |
| 0200 | sense Strand | | |
| CD274- | 19-mer Anti- | UUGGGAAUUUGCAUUCAAU | 254 |
| 0204 | sense Strand | | |
| CD274- | 19-mer Anti- | UUAAUUGUUUUUCUACUGG | 255 |
| 0219 | sense Strand | | |
| CD274- | 19-mer Anti- | UGUCUAAUUGUUUUUCUAC | 256 |
| 0222 | sense Strand | | |
| CD274- | 19-mer Anti- | UCAGGUCUAAUUGUUUUUC | 257 |
| 0225 | sense Strand | | |
| CD274- | 19-mer Anti- | UUAAUGUUCUUAUCCUCCA | 258 |
| 0268 | sense Strand | | |
| CD274- | 19-mer Anti- | UAUAAUGUUCUUAUCCUCC | 259 |
| 0269 | sense Strand | | |
| CD274- | 19-mer Anti- | UGAAUAAUGUUCUUAUCCU | 260 |
| 0271 | sense Strand | | |
| CD274- | 19-mer Anti- | UAUUGAAUAAUGUUCUUAU | 261 |
| 0274 | sense Strand | | |
| CD274- | 19-mer Anti- | UAAUUGAAUAAUGUUCUUA | 262 |
| 0275 | sense Strand | | |
| CD274- | 19-mer Anti- | UCAAAUUGAAUAAUGUUCU | 263 |
| 0277 | sense Strand | | |
| CD274- | 19-mer Anti- | UAUGCACAAAUUGAAUAAU | 264 |
| 0282 | sense Strand | | |
| CD274- | 19-mer Anti- | UCAUGCACAAAUUGAAUAA | 265 |
| 0283 | sense Strand | | |
| CD274- | 19-mer Anti- | UGCAAUUUCACAUCUGUGA | 266 |
| 0394 | sense Strand | | |
| CD274- | 19-mer Anti- | UAUCCUGCAAUUUCACAUC | 267 |
| 0399 | sense Strand | | |
| CD274- | 19-mer Anti- | UUCAUGUUCAGAGGUGACU | 268 |
| 0530 | sense Strand | | |
| CD274- | 19-mer Anti- | UUUCAUGUUCAGAGGUGAC | 269 |
| 0531 | sense Strand | | |
| CD274- | 19-mer Anti- | UACAUUGAAAAGCUUCUCC | 270 |
| 0653 | sense Strand | | |
| CD274- | 19-mer Anti- | UUGAUUCUCAGUGUGCUGG | 271 |
| 0673 | sense Strand | | |
| CD274- | 19-mer Anti- | UAAUCUCAUUAGUUGUUGU | 272 |
| 0693 | sense Strand | | |
| CD274- | 19-mer Anti- | UAGAAAAUCUCAUUAGUUG | 273 |
| 0697 | sense Strand | | |
| CD274- | 19-mer Anti- | UAGUAGAAAAUCUCAUUAG | 274 |
| 0700 | sense Strand | | |
| CD274- | 19-mer Anti- | UCAGUAGAAAAUCUCAUUA | 275 |
| 0701 | sense Strand | | |
| CD274- | 19-mer Anti- | UUCAGCUGUAUGGUUUUCC | 276 |
| 0743 | sense Strand | | |
| CD274- | 19-mer Anti- | UAAUUCAGCUGUAUGGUUU | 277 |
| 0746 | sense Strand | | |
| CD274- | 19-mer Anti- | UAAGACAGCAAAUAUCCUC | 278 |
| 0095 | sense Strand | | |
| CD274- | 19-mer Anti- | UUAUAAAGACAGCAAAUAU | 279 |
| 0099 | sense Strand | | |
| CD274- | 19-mer Anti- | UUGAAUAUAAAGACAGCAA | 280 |
| 0103 | sense Strand | | |
| CD274- | 19-mer Anti- | UGCAUUCAAUUGUCAUAUU | 281 |
| 0195 | sense Strand | | |
| CD274- | 19-mer Anti- | UUGCAUUCAAUUGUCAUAU | 282 |
| 0196 | sense Strand | | |
| CD274- | 19-mer Anti- | UUUUGCAUUCAAUUGUCAU | 283 |
| 0198 | sense Strand | | |
| CD274- | 19-mer Anti- | UAUUUGCAUUCAAUUGUCA | 284 |
| 0199 | sense Strand | | |
| CD274- | 19-mer Anti- | UGAAUUUGCAUUCAAUUGU | 285 |
| 0201 | sense Strand | | |
| CD274- | 19-mer Anti- | UGGAAUUUGCAUUCAAUUG | 286 |
| 0202 | sense Strand | | |
| CD274- | 19-mer Anti- | UUACUGGGAAUUUGCAUUC | 287 |
| 0207 | sense Strand | | |
| CD274- | 19-mer Anti- | UUCUAAUUGUUUUUCUACU | 288 |
| 0221 | sense Strand | | |
| CD274- | 19-mer Anti- | UCAAUAGACAAUUAGUGCA | 289 |
| 0245 | sense Strand | | |
| CD274- | 19-mer Anti- | UUCCCAAUAGACAAUUAGU | 290 |
| 0248 | sense Strand | | |
| CD274- | 19-mer Anti- | UUUCCCAAUAGACAAUUAG | 291 |
| 0249 | sense Strand | | |
| CD274- | 19-mer Anti- | UUGUUCUUAUCCUCCAUUU | 292 |
| 0265 | sense Strand | | |
| CD274- | 19-mer Anti- | UAUGUUCUUAUCCUCCAUU | 293 |
| 0266 | sense Strand | | |
| CD274- | 19-mer Anti- | UAAUGUUCUUAUCCUCCAU | 294 |
| 0267 | sense Strand | | |
| CD274- | 19-mer Anti- | UAAUAAUGUUCUUAUCCUC | 295 |
| 0270 | sense Strand | | |
| CD274- | 19-mer Anti- | UUGAAUAAUGUUCUUAUCC | 296 |
| 0272 | sense Strand | | |
| CD274- | 19-mer Anti- | UUUGAAUAAUGUUCUUAUC | 297 |
| 0273 | sense Strand | | |
| CD274- | 19-mer Anti- | UAAAUUGAAUAAUGUUCUU | 298 |
| 0276 | sense Strand | | |
| CD274- | 19-mer Anti- | UACAAAUUGAAUAAUGUUC | 299 |
| 0278 | sense Strand | | |
| CD274- | 19-mer Anti- | UCACAAAUUGAAUAAUGUU | 300 |
| 0279 | sense Strand | | |
| CD274- | 19-mer Anti- | UGCACAAAUUGAAUAAUGU | 301 |
| 0280 | sense Strand | | |
| CD274- | 19-mer Anti- | UUGCACAAAUUGAAUAAUG | 302 |
| 0281 | sense Strand | | |
| CD274- | 19-mer Anti- | UUCCAUGCACAAAUUGAAU | 303 |
| 0285 | sense Strand | | |
| CD274- | 19-mer Anti- | UAACCUUCAGGUCUUCCUC | 304 |
| 0303 | sense Strand | | |
| CD274- | 19-mer Anti- | UUGAACCUUCAGGUCUUCC | 305 |
| 0305 | sense Strand | | |
| CD274- | 19-mer Anti- | UUGCUGAACCUUCAGGUCU | 306 |
| 0308 | sense Strand | | |
| CD274- | 19-mer Anti- | UAUGCUGAACCUUCAGGUC | 307 |
| 0309 | sense Strand | | |
| CD274- | 19-mer Anti- | UUAUGCUGAACCUUCAGGU | 308 |
| 0310 | sense Strand | | |
| CD274- | 19-mer Anti- | UACUAUGCUGAACCUUCAG | 309 |
| 0312 | sense Strand | | |
| CD274- | 19-mer Anti- | UUACUAUGCUGAACCUUCA | 310 |
| 0313 | sense Strand | | |
| CD274- | 19-mer Anti- | UAAUUUCACAUCUGUGAUC | 311 |
| 0392 | sense Strand | | |
| CD274- | 19-mer Anti- | UUGCAAUUUCACAUCUGUG | 312 |
| 0395 | sense Strand | | |
| CD274- | 19-mer Anti- | UUCCUGCAAUUUCACAUCU | 313 |
| 0398 | sense Strand | | |
| CD274- | 19-mer Anti- | UAUUCUUUGGUUGAUUUUG | 314 |
| 0497 | sense Strand | | |
| CD274- | 19-mer Anti- | UAAAUUCUUUGGUUGAUUU | 315 |
| 0499 | sense Strand | | |
| CD274- | 19-mer Anti- | UAAAAUUCUUUGGUUGAUU | 316 |
| 0500 | sense Strand | | |
| CD274- | 19-mer Anti- | UCAAAAUUCUUUGGUUGAU | 317 |
| 0501 | sense Strand | | |
| CD274- | 19-mer Anti- | UCCAAAAUUCUUUGGUUGA | 318 |
| 0502 | sense Strand | | |
| CD274- | 19-mer Anti- | UAACCAAAAUUCUUUGGUU | 319 |
| 0504 | sense Strand | | |
| CD274- | 19-mer Anti- | UCAACCAAAAUUCUUUGGU | 320 |
| 0505 | sense Strand | | |
| CD274- | 19-mer Anti- | UACAACCAAAAUUCUUUGG | 321 |
| 0506 | sense Strand | | |
| CD274- | 19-mer Anti- | UCACAACCAAAAUUCUUUG | 322 |
| 0507 | sense Strand | | |
| CD274- | 19-mer Anti- | UUCCACAACCAAAAUUCUU | 323 |
| 0509 | sense Strand | | |
| CD274- | 19-mer Anti- | UAUCCACAACCAAAAUUCU | 324 |
| 0510 | sense Strand | | |
| CD274- | 19-mer Anti- | UGAUCCACAACCAAAAUUC | 325 |
| 0511 | sense Strand | | |
| CD274- | 19-mer Anti- | UUGGAUCCACAACCAAAAU | 326 |
| 0513 | sense Strand | | |
| CD274- | 19-mer Anti- | UUCAGUUCAUGUUCAGAGG | 327 |
| 0535 | sense Strand | | |
| CD274- | 19-mer Anti- | UUGUCAGUUCAUGUUCAGA | 328 |
| 0537 | sense Strand | | |
| CD274- | 19-mer Anti- | UUGACAUGUCAGUUCAUGU | 329 |
| 0542 | sense Strand | | |
| CD274- | 19-mer Anti- | UUGCUUGUCCAGAUGACUU | 330 |
| 0583 | sense Strand | | |
| CD274- | 19-mer Anti- | UUUGAUGGUCACUGCUUGU | 331 |
| 0594 | sense Strand | | |
| CD274- | 19-mer Anti- | UUCAGGACUUGAUGGUCAC | 332 |
| 0601 | sense Strand | | |
| CD274- | 19-mer Anti- | UCACAUUGAAAAGCUUCUC | 333 |
| 0654 | sense Strand | | |
| CD274- | 19-mer Anti- | UUCACAUUGAAAAGCUUCU | 334 |
| 0655 | sense Strand | | |
| CD274- | 19-mer Anti- | UGUCACAUUGAAAAGCUUC | 335 |
| 0656 | sense Strand | | |
| CD274- | 19-mer Anti- | UUGGUCACAUUGAAAAGCU | 336 |
| 0658 | sense Strand | | |
| CD274- | 19-mer Anti- | UUGCUGGUCACAUUGAAAA | 337 |
| 0661 | sense Strand | | |
| CD274- | 19-mer Anti- | UUCAGUGUGCUGGUCACAU | 338 |
| 0667 | sense Strand | | |
| CD274- | 19-mer Anti- | UUGUUGAUUCUCAGUGUGC | 339 |
| 0676 | sense Strand | | |
| CD274- | 19-mer Anti- | UUUGUGUUGAUUCUCAGUG | 340 |
| 0679 | sense Strand | | |
| CD274- | 19-mer Anti- | UUGUUGUGUUGAUUCUCAG | 341 |
| 0681 | sense Strand | | |
| CD274- | 19-mer Anti- | UUAGUUGUUGUGUUGAUUC | 342 |
| 0685 | sense Strand | | |
| CD274- | 19-mer Anti- | UAUCUCAUUAGUUGUUGUG | 343 |
| 0692 | sense Strand | | |
| CD274- | 19-mer Anti- | UAAAAUCUCAUUAGUUGUU | 344 |
| 0695 | sense Strand | | |
| CD274- | 19-mer Anti- | UGAAAAUCUCAUUAGUUGU | 345 |
| 0696 | sense Strand | | |
| CD274- | 19-mer Anti- | UUAGAAAAUCUCAUUAGUU | 346 |
| 0698 | sense Strand | | |
| CD274- | 19-mer Anti- | UUGCAGUAGAAAAUCUCAU | 347 |
| 0703 | sense Strand | | |
| CD274- | 19-mer Anti- | UUAAAAGUGCAGUAGAAAA | 348 |
| 0709 | sense Strand | | |
| CD274- | 19-mer Anti- | UAUUCAGCUGUAUGGUUUU | 349 |
| 0745 | sense Strand | | |
| CD274- | 19-mer Anti- | UACCAAUUCAGCUGUAUGG | 350 |
| 0749 | sense Strand | | |
| CD274- | 19-mer Anti- | UAUGACCAAUUCAGCUGUA | 351 |
| 0752 | sense Strand | | |
| CD274- | 19-mer Anti- | UACCAAGUGAGUCCUUUCA | 352 |
| 0800 | sense Strand | | |
| CD274- | 19-mer Anti- | UAAUUACCAAGUGAGUCCU | 353 |
| 0804 | sense Strand | | |
| CD274- | 19-mer Anti- | UUGAAUGUCAGUGCUACAC | 354 |
| 0847 | sense Strand | | |
| CD274- | 19-mer Anti- | UGAAGAUGAAUGUCAGUGC | 355 |
| 0852 | sense Strand | | |
| CD274- | 19-mer Anti- | UAUUUUUUCACAUCCAUCA | 356 |
| 0889 | sense Strand | | |
| CD274- | 19-mer Anti- | UUGAAAGUAUCAAGGUCUC | 357 |
| 1172 | sense Strand | | |
| CD274- | 19-mer Anti- | UUUGAAAGUAUCAAGGUCU | 358 |
| 1173 | sense Strand | | |
| CD274- | 19-mer Anti- | UUUUGAAAGUAUCAAGGUC | 359 |
| 1174 | sense Strand | | |
| CD274- | 19-mer Anti- | UCAUUUGAAAGUAUCAAGG | 360 |
| 1176 | sense Strand | | |
| CD274- | 19-mer Anti- | UGGCAUUUGAAAGUAUCAA | 361 |
| 1178 | sense Strand | | |
| CD274- | 19-mer Anti- | UUGUUCAGAAGUAUCCUUU | 362 |
| 1227 | sense Strand | | |
| CD274- | 19-mer Anti- | UUCCUUGUUCAGAAGUAUC | 363 |
| 1231 | sense Strand | | |
| CD274- | 19-mer Anti- | UACAGACUCAAAAUAAAUA | 364 |
| 1423 | sense Strand | | |
| CD274- | 19-mer Anti- | UUCACAGACUCAAAAUAAA | 365 |
| 1425 | sense Strand | | |
| CD274- | 19-mer Anti- | UUCAUUCACAACCACACUC | 366 |
| 1459 | sense Strand | | |
| CD274- | 19-mer Anti- | UAUCAUUCACAACCACACU | 367 |
| 1460 | sense Strand | | |
| CD274- | 19-mer Anti- | UAAUCAUUCACAACCACAC | 368 |
| 1461 | sense Strand | | |
| CD274- | 19-mer Anti- | UAAAUCAUUCACAACCACA | 369 |
| 1462 | sense Strand | | |
| CD274- | 19-mer Anti- | UGAAAUCAUUCACAACCAC | 370 |
| 1463 | sense Strand | | |
| CD274- | 19-mer Anti- | UAGAAAUCAUUCACAACCA | 371 |
| 1464 | sense Strand | | |
| CD274- | 19-mer Anti- | UAAGAAAUCAUUCACAACC | 372 |
| 1465 | sense Strand | | |
| CD274- | 19-mer Anti- | UAAAAGAAAUCAUUCACAA | 373 |
| 1467 | sense Strand | | |
| CD274- | 19-mer Anti- | UUCAAAAGAAAUCAUUCAC | 374 |
| 1469 | sense Strand | | |
| CD274- | 19-mer Anti- | UUUCAAAAGAAAUCAUUCA | 375 |
| 1470 | sense Strand | | |
| CD274- | 19-mer Anti- | UAUCUUCAAAAGAAAUCAU | 376 |
| 1473 | sense Strand | | |
| CD274- | 19-mer Anti- | UUAUCUUCAAAAGAAAUCA | 377 |
| 1474 | sense Strand | | |
| CD274- | 19-mer Anti- | UUACAAUAUAUCUUCAAAA | 378 |
| 1481 | sense Strand | | |
| CD274- | 19-mer Anti- | UUACUACAAUAUAUCUUCA | 379 |
| 1484 | sense Strand | | |
| CD274- | 19-mer Anti- | UUCUACUACAAUAUAUCUU | 380 |
| 1486 | sense Strand | | |
| CD274- | 19-mer Anti- | UCAAAAUUGUAACAUCUAC | 381 |
| 1499 | sense Strand | | |
| CD274- | 19-mer Anti- | UACAAAAUUGUAACAUCUA | 382 |
| 1500 | sense Strand | | |
| CD274- | 19-mer Anti- | UUAGAUGUGAGCAAAUCAU | 383 |
| 1541 | sense Strand | | |
| CD274- | 19-mer Anti- | UUACAAAUACUCCAUGUUU | 384 |
| 1562 | sense Strand | | |
| CD274- | 19-mer Anti- | UUGCUUCCAAUGUAUACUU | 385 |
| 1606 | sense Strand | | |
| CD274- | 19-mer Anti- | UAUGCUUCCAAUGUAUACU | 386 |
| 1607 | sense Strand | | |
| CD274- | 19-mer Anti- | UUAAAUAAAGGUGACAUCC | 387 |
| 1649 | sense Strand | | |
| CD274- | 19-mer Anti- | UUGAUAUUUAAAUGGAACA | 388 |
| 1728 | sense Strand | | |
| CD274- | 19-mer Anti- | UUCACAACAGGGUGGUUAC | 389 |
| 1794 | sense Strand | | |
| CD274- | 19-mer Anti- | UAUCACAACAGGGUGGUUA | 390 |
| 1795 | sense Strand | | |
| CD274- | 19-mer Anti- | UUAAUAGUGGUUAUCACAA | 391 |
| 1806 | sense Strand | | |
| CD274- | 19-mer Anti- | UAUAAUAGUGGUUAUCACA | 392 |
| 1807 | sense Strand | | |
| CD274- | 19-mer Anti- | UAAUAAUAGUGGUUAUCAC | 393 |
| 1808 | sense Strand | | |
| CD274- | 19-mer Anti- | UAAAUAAUAGUGGUUAUCA | 394 |
| 1809 | sense Strand | | |
| CD274- | 19-mer Anti- | UAAAAUAAUAGUGGUUAUC | 395 |
| 1810 | sense Strand | | |
| CD274- | 19-mer Anti- | UUAAAAUAAUAGUGGUUAU | 396 |
| 1811 | sense Strand | | |
| CD274- | 19-mer Anti- | UGUAAAAUAAUAGUGGUUA | 397 |
| 1812 | sense Strand | | |
| CD274- | 19-mer Anti- | UUAUUAUAAAAGGACAGUG | 398 |
| 1906 | sense Strand | | |
| CD274- | 19-mer Anti- | UGUAUUAUAAAAGGACAGU | 399 |
| 1907 | sense Strand | | |
| CD274- | 19-mer Anti- | UUGUAUUAUAAAAGGACAG | 400 |
| 1908 | sense Strand | | |
| CD274- | 19-mer Anti- | UUUGUAUUAUAAAAGGACA | 401 |
| 1909 | sense Strand | | |
| CD274- | 19-mer Anti- | UAUUGUAUUAUAAAAGGAC | 402 |
| 1910 | sense Strand | | |
| CD274- | 19-mer Anti- | UUAAAUUGUAUUAUAAAAG | 403 |
| 1913 | sense Strand | | |
| CD274- | 19-mer Anti- | UUGUAAAUUGUAUUAUAAA | 404 |
| 1915 | sense Strand | | |
| CD274- | 19-mer Anti- | UUAGCUGUAAAUUGUAUUA | 405 |
| 1919 | sense Strand | | |
| CD274- | 19-mer Anti- | UUAAAGUAAAAUAUAGCUG | 406 |
| 1931 | sense Strand | | |
| CD274- | 19-mer Anti- | UUGCUUAAAGUAAAAUAUA | 407 |
| 1935 | sense Strand | | |
| CD274- | 19-mer Anti- | UAUUGCUUAAAGUAAAAUA | 408 |
| 1937 | sense Strand | | |
| CD274- | 19-mer Anti- | UUCACAUCUGUAGAUUCAA | 409 |
| 2014 | sense Strand | | |
| CD274- | 19-mer Anti- | UAUUGUAAUAAUACAUUUU | 410 |
| 2088 | sense Strand | | |
| CD274- | 19-mer Anti- | UUGAAAAUUACUCUGAUUA | 411 |
| 2221 | sense Strand | | |
| CD274- | 19-mer Anti- | UUAAAUGAAAAUUACUCUG | 412 |
| 2225 | sense Strand | | |
| CD274- | 19-mer Anti- | UUGUAAAUGAAAAUUACUC | 413 |
| 2227 | sense Strand | | |
| CD274- | 19-mer Anti- | UUUGUAAAUGAAAAUUACU | 414 |
| 2228 | sense Strand | | |
| CD274- | 19-mer Anti- | UUUUGUAAAUGAAAAUUAC | 415 |
| 2229 | sense Strand | | |
| CD274- | 19-mer Anti- | UUCUUUGUAAAUGAAAAUU | 416 |
| 2231 | sense Strand | | |
| CD274- | 19-mer Anti- | UUCUCUUUGUAAAUGAAAA | 417 |
| 2233 | sense Strand | | |
| CD274- | 19-mer Anti- | UUAUUUUUCAGGGUUAUUU | 418 |
| 2263 | sense Strand | | |
| CD274- | 19-mer Anti- | UUGUUAUUUUUCAGGGUUA | 419 |
| 2266 | sense Strand | | |
| CD274- | 19-mer Anti- | UAACAAGCAUUAGAUUAUA | 420 |
| 2333 | sense Strand | | |
| CD274- | 19-mer Anti- | UUAAACAAGCAUUAGAUUA | 421 |
| 2335 | sense Strand | | |
| CD274- | 19-mer Anti- | UUAUAAACAAGCAUUAGAU | 422 |
| 2337 | sense Strand | | |
| CD274- | 19-mer Anti- | UAUAUAAACAAGCAUUAGA | 423 |
| 2338 | sense Strand | | |
| CD274- | 19-mer Anti- | UUAUAUAAACAAGCAUUAG | 424 |
| 2339 | sense Strand | | |
| CD274- | 19-mer Anti- | UACUAUAUAAACAAGCAUU | 425 |
| 2341 | sense Strand | | |
| CD274- | 19-mer Anti- | UACACUAUAUAAACAAGCA | 426 |
| 2343 | sense Strand | | |
| CD274- | 19-mer Anti- | UAACUGUUAAACAAUACCA | 427 |
| 2362 | sense Strand | | |
| CD274- | 19-mer Anti- | UGAACUGUUAAACAAUACC | 428 |
| 2363 | sense Strand | | |
| CD274- | 19-mer Anti- | UAAGGUAUGAAUUUAAAAU | 429 |
| 2407 | sense Strand | | |
| CD274- | 19-mer Anti- | UACAUUUCCAAAUGUAGAC | 430 |
| 2556 | sense Strand | | |
| CD274- | 19-mer Anti- | UUACAUUUCCAAAUGUAGA | 431 |
| 2557 | sense Strand | | |
| CD274- | 19-mer Anti- | UAACAUACAUUUCCAAAUG | 432 |
| 2561 | sense Strand | | |
| CD274- | 19-mer Anti- | UUAACAUACAUUUCCAAAU | 433 |
| 2562 | sense Strand | | |
| CD274- | 19-mer Anti- | UUUAACAUACAUUUCCAAA | 434 |
| 2563 | sense Strand | | |
| CD274- | 19-mer Anti- | UUUUUAACAUACAUUUCCA | 435 |
| 2565 | sense Strand | | |
| CD274- | 19-mer Anti- | UUGCUUUUAACAUACAUUU | 436 |
| 2568 | sense Strand | | |
| CD274- | 19-mer Anti- | UAAAAUAGCAAAGUACACA | 437 |
| 2634 | sense Strand | | |
| CD274- | 19-mer Anti- | UUAAAAAUAGCAAAGUACA | 438 |
| 2636 | sense Strand | | |
| CD274- | 19-mer Anti- | UAUAAAAAUAGCAAAGUAC | 439 |
| 2637 | sense Strand | | |
| CD274- | 19-mer Anti- | UUAAAUAAAAAUAGCAAAG | 440 |
| 2640 | sense Strand | | |
| CD274- | 19-mer Anti- | UUUCAUUCCAUCUGCUAUA | 441 |
| 2673 | sense Strand | | |
| CD274- | 19-mer Anti- | UUCAAAUUCAUUCCAUCUG | 442 |
| 2678 | sense Strand | | |
| CD274- | 19-mer Anti- | UUUCAAAUUCAUUCCAUCU | 443 |
| 2679 | sense Strand | | |
| CD274- | 19-mer Anti- | UUGGUUGUCUAAAUGUAUA | 444 |
| 2801 | sense Strand | | |
| CD274- | 19-mer Anti- | UUACUUAACAAAUGGUGGU | 445 |
| 2815 | sense Strand | | |
| CD274- | 19-mer Anti- | UCAAAUACUUAACAAAUGG | 446 |
| 2819 | sense Strand | | |
| CD274- | 19-mer Anti- | UUAAUAAUAAGAUUGCUUU | 447 |
| 2924 | sense Strand | | |
| CD274- | 19-mer Anti- | UUCAUACAGAGUUAAUAAU | 448 |
| 2935 | sense Strand | | |
| CD274- | 19-mer Anti- | UGUCAUACAGAGUUAAUAA | 449 |
| 2936 | sense Strand | | |
| CD274- | 19-mer Anti- | UUGUCAUACAGAGUUAAUA | 450 |
| 2937 | sense Strand | | |
| CD274- | 19-mer Anti- | UUCUGUCAUACAGAGUUAA | 451 |
| 2939 | sense Strand | | |
| CD274- | 19-mer Anti- | UUCAAAGUGAAGUUUAUAC | 452 |
| 2994 | sense Strand | | |
| CD274- | 19-mer Anti- | UUGUGAUUUUGCAAGUACA | 453 |
| 3015 | sense Strand | | |
| CD274- | 19-mer Anti- | UAAAAUGUGAUUUUGCAAG | 454 |
| 3019 | sense Strand | | |
| CD274- | 19-mer Anti- | UUCAAGCACAACGAAUGAG | 455 |
| 3094 | sense Strand | | |
| CD274- | 19-mer Anti- | UUUCAAGCACAACGAAUGA | 456 |
| 3095 | sense Strand | | |
| CD274- | 19-mer Anti- | UUACAAACAGAUAACACAA | 457 |
| 3305 | sense Strand | | |
| CD274- | 19-mer Anti- | UGUACAAACAGAUAACACA | 458 |
| 3306 | sense Strand | | |
| CD274- | 19-mer Anti- | UUGUACAAACAGAUAACAC | 459 |
| 3307 | sense Strand | | |
| CD274- | 19-mer Anti- | UAUGUACAAACAGAUAACA | 460 |
| 3308 | sense Strand | | |
| CD274- | 19-mer Anti- | UACAUGUACAAACAGAUAA | 461 |
| 3310 | sense Strand | | |
| CD274- | 19-mer Anti- | UUACAAAUGCACAUGUACA | 462 |
| 3319 | sense Strand | | |
| CD274- | 19-mer Anti- | UUUACUGUACAAAUGCACA | 463 |
| 3325 | sense Strand | | |
| CD274- | 19-mer Anti- | UUAAUUCACACAAAGAACA | 464 |
| 3355 | sense Strand | | |
| CD274- | 19-mer Anti- | UUGUAAUUCACACAAAGAA | 465 |
| 3357 | sense Strand | | |
| CD274- | 19-mer Anti- | UUACAAAUCCAACACCACA | 466 |
| 3441 | sense Strand | | |
| CD274- | 19-mer Anti- | UUGACAAUCAAAUGCAGAA | 467 |
| 3522 | sense Strand | | |
| CD274- | 19-mer Anti- | UAAAAAGUGACAAUCAAAU | 468 |
| 3528 | sense Strand | | |
| CD274- | 19-mer Anti- | UUACAAAAAGUGACAAUCA | 469 |
| 3531 | sense Strand | | |
| CD274- | 19-mer Anti- | UGUACAAAAAGUGACAAUC | 470 |
| 3532 | sense Strand | | |
| CD274- | 19-mer Anti- | UAGGUACAAAAAGUGACAA | 471 |
| 3534 | sense Strand | | |
| CD274- | 19-mer Anti- | UUUAAUGCAGGUACAAAAA | 472 |
| 3541 | sense Strand | | |
| CD274- | 19-mer Anti- | UAUUAAUGCAGGUACAAAA | 473 |
| 3542 | sense Strand | | |
| CD274- | 19-mer Anti- | UUAAAUUAAUGCAGGUACA | 474 |
| 3545 | sense Strand | | |
| CD274- | 19-mer Anti- | UUUAAAUUAAUGCAGGUAC | 475 |
| 3546 | sense Strand | | |
| CD274- | 19-mer Anti- | UACAAAAUAAAUAAGAAUA | 476 |
| 3569 | sense Strand | | |
| CD274- | 19-mer Anti- | UACCAAGUAACAAAAUAAA | 477 |
| 3577 | sense Strand | | |
| CD274- | 19-mer Anti- | UUACCAAGUAACAAAAUAA | 478 |
| 3578 | sense Strand | | |
| CD274- | 19-mer Anti- | UUGUACCAAGUAACAAAAU | 479 |
| 3580 | sense Strand | | |
| CD274- | 19-mer Anti- | UUAAACAAGAAAAUGGACA | 480 |
| 3604 | sense Strand | | |
| CD274- | 19-mer Anti- | UACAAAAUAAACAAGAAAA | 481 |
| 3610 | sense Strand | | |
| CD274- | 19-mer Anti- | UAUUUUAUUAAACACAAAA | 482 |
| 3622 | sense Strand | | |
| CD274- | Unmodified | AGAAAGAUGAGGAUAUUUGAGCAGCCGAAAGG | 483 |
| 0088 | 36-mer | CUGC | |
| CD274- | Unmodified | AUGAGGAUAUUUGCUGUCUAGCAGCCGAAAGG | 484 |
| 0094 | 36-mer | CUGC | |
| CD274- | Unmodified | AGGAUAUUUGCUGUCUUUAAGCAGCCGAAAGG | 486 |
| 0097 | 36-mer | CUGC | |
| CD274- | Unmodified | GGAUAUUUGCUGUCUUUAUAGCAGCCGAAAGG | 487 |
| 0098 | 36-mer | CUGC | |
| CD274- | Unmodified | AUAUUUGCUGUCUUUAUAUAGCAGCCGAAAGG | 488 |
| 0100 | 36-mer | CUGC | |
| CD274- | Unmodified | AUUUGCUGUCUUUAUAUUCAGCAGCCGAAAGGC | 489 |
| 0102 | 36-mer | UGC | |
| CD274- | Unmodified | AGGACCUAUAUGUGGUAGAAGCAGCCGAAAGG | 490 |
| 0167 | 36-mer | CUGC | |
| CD274- | Unmodified | AGCAAUAUGACAAUUGAAUAGCAGCCGAAAGG | 491 |
| 0193 | 36-mer | CUGC | |
| CD274- | Unmodified | GCAAUAUGACAAUUGAAUGAGCAGCCGAAAGG | 492 |
| 0194 | 36-mer | CUGC | |
| CD274- | Unmodified | AUAUGACAAUUGAAUGCAAAGCAGCCGAAAGG | 493 |
| 0197 | 36-mer | CUGC | |
| CD274- | Unmodified | UGACAAUUGAAUGCAAAUUAGCAGCCGAAAGG | 494 |
| 0200 | 36-mer | CUGC | |
| CD274- | Unmodified | AAUUGAAUGCAAAUUCCCAAGCAGCCGAAAGGC | 495 |
| 0204 | 36-mer | UGC | |
| CD274- | Unmodified | CCCAGUAGAAAAACAAUUAAGCAGCCGAAAGGC | 496 |
| 0219 | 36-mer | UGC | |
| CD274- | Unmodified | AGUAGAAAAACAAUUAGACAGCAGCCGAAAGG | 497 |
| 0222 | 36-mer | CUGC | |
| CD274- | Unmodified | AGAAAAACAAUUAGACCUGAGCAGCCGAAAGGC | 498 |
| 0225 | 36-mer | UGC | |
| CD274- | Unmodified | AUGGAGGAUAAGAACAUUAAGCAGCCGAAAGG | 499 |
| 0268 | 36-mer | CUGC | |
| CD274- | Unmodified | UGGAGGAUAAGAACAUUAUAGCAGCCGAAAGG | 500 |
| 0269 | 36-mer | CUGC | |
| CD274- | Unmodified | GAGGAUAAGAACAUUAUUCAGCAGCCGAAAGG | 501 |
| 0271 | 36-mer | CUGC | |
| CD274- | Unmodified | GAUAAGAACAUUAUUCAAUAGCAGCCGAAAGG | 502 |
| 0274 | 36-mer | CUGC | |
| CD274- | Unmodified | AUAAGAACAUUAUUCAAUUAGCAGCCGAAAGG | 503 |
| 0275 | 36-mer | CUGC | |
| CD274- | Unmodified | AAGAACAUUAUUCAAUUUGAGCAGCCGAAAGG | 504 |
| 0277 | 36-mer | CUGC | |
| CD274- | Unmodified | CAUUAUUCAAUUUGUGCAUAGCAGCCGAAAGGC | 505 |
| 0282 | 36-mer | UGC | |
| CD274- | Unmodified | AUUAUUCAAUUUGUGCAUGAGCAGCCGAAAGG | 506 |
| 0283 | 36-mer | CUGC | |
| CD274- | Unmodified | AUCACAGAUGUGAAAUUGCAGCAGCCGAAAGGC | 507 |
| 0394 | 36-mer | UGC | |
| CD274- | Unmodified | AGAUGUGAAAUUGCAGGAUAGCAGCCGAAAGG | 508 |
| 0399 | 36-mer | CUGC | |
| CD274- | Unmodified | CAGUCACCUCUGAACAUGAAGCAGCCGAAAGGC | 509 |
| 0530 | 36-mer | UGC | |
| CD274- | Unmodified | AGUCACCUCUGAACAUGAAAGCAGCCGAAAGGC | 510 |
| 0531 | 36-mer | UGC | |
| CD274- | Unmodified | AGGAGAAGCUUUUCAAUGUAGCAGCCGAAAGG | 511 |
| 0653 | 36-mer | CUGC | |
| CD274- | Unmodified | ACCAGCACACUGAGAAUCAAGCAGCCGAAAGGC | 512 |
| 0673 | 36-mer | UGC | |
| CD274- | Unmodified | CACAACAACUAAUGAGAUUAGCAGCCGAAAGGC | 513 |
| 0693 | 36-mer | UGC | |
| CD274- | Unmodified | ACAACUAAUGAGAUUUUCUAGCAGCCGAAAGGC | 514 |
| 0697 | 36-mer | UGC | |
| CD274- | Unmodified | ACUAAUGAGAUUUUCUACUAGCAGCCGAAAGGC | 515 |
| 0700 | 36-mer | UGC | |
| CD274- | Unmodified | CUAAUGAGAUUUUCUACUGAGCAGCCGAAAGGC | 516 |
| 0701 | 36-mer | UGC | |
| CD274- | Unmodified | AGGAAAACCAUACAGCUGAAGCAGCCGAAAGGC | 517 |
| 0743 | 36-mer | UGC | |
| CD274- | Unmodified | AAAACCAUACAGCUGAAUUAGCAGCCGAAAGGC | 518 |
| 0746 | 36-mer | UGC | |
| CD274- | Unmodified | UGAGGAUAUUUGCUGUCUUAGCAGCCGAAAGG | 519 |
| 0095 | 36-mer | CUGC | |
| CD274- | Unmodified | GAUAUUUGCUGUCUUUAUAAGCAGCCGAAAGG | 520 |
| 0099 | 36-mer | CUGC | |
| CD274- | Unmodified | UUUGCUGUCUUUAUAUUCAAGCAGCCGAAAGGC | 521 |
| 0103 | 36-mer | UGC | |
| CD274- | Unmodified | CAAUAUGACAAUUGAAUGCAGCAGCCGAAAGGC | 522 |
| 0195 | 36-mer | UGC | |
| CD274- | Unmodified | AAUAUGACAAUUGAAUGCAAGCAGCCGAAAGG | 523 |
| 0196 | 36-mer | CUGC | |
| CD274- | Unmodified | UAUGACAAUUGAAUGCAAAAGCAGCCGAAAGG | 524 |
| 0198 | 36-mer | CUGC | |
| CD274- | Unmodified | AUGACAAUUGAAUGCAAAUAGCAGCCGAAAGG | 525 |
| 0199 | 36-mer | CUGC | |
| CD274- | Unmodified | GACAAUUGAAUGCAAAUUCAGCAGCCGAAAGGC | 526 |
| 0201 | 36-mer | UGC | |
| CD274- | Unmodified | ACAAUUGAAUGCAAAUUCCAGCAGCCGAAAGGC | 527 |
| 0202 | 36-mer | UGC | |
| CD274- | Unmodified | UGAAUGCAAAUUCCCAGUAAGCAGCCGAAAGGC | 528 |
| 0207 | 36-mer | UGC | |
| CD274- | Unmodified | CAGUAGAAAAACAAUUAGAAGCAGCCGAAAGG | 529 |
| 0221 | 36-mer | CUGC | |
| CD274- | Unmodified | CUGCACUAAUUGUCUAUUGAGCAGCCGAAAGGC | 530 |
| 0245 | 36-mer | UGC | |
| CD274- | Unmodified | CACUAAUUGUCUAUUGGGAAGCAGCCGAAAGGC | 531 |
| 0248 | 36-mer | UGC | |
| CD274- | Unmodified | ACUAAUUGUCUAUUGGGAAAGCAGCCGAAAGG | 532 |
| 0249 | 36-mer | CUGC | |
| CD274- | Unmodified | GAAAUGGAGGAUAAGAACAAGCAGCCGAAAGG | 533 |
| 0265 | 36-mer | CUGC | |
| CD274- | Unmodified | AAAUGGAGGAUAAGAACAUAGCAGCCGAAAGG | 534 |
| 0266 | 36-mer | CUGC | |
| CD274- | Unmodified | AAUGGAGGAUAAGAACAUUAGCAGCCGAAAGG | 535 |
| 0267 | 36-mer | CUGC | |
| CD274- | Unmodified | GGAGGAUAAGAACAUUAUUAGCAGCCGAAAGG | 536 |
| 0270 | 36-mer | CUGC | |
| CD274- | Unmodified | AGGAUAAGAACAUUAUUCAAGCAGCCGAAAGG | 537 |
| 0272 | 36-mer | CUGC | |
| CD274- | Unmodified | GGAUAAGAACAUUAUUCAAAGCAGCCGAAAGG | 538 |
| 0273 | 36-mer | CUGC | |
| CD274- | Unmodified | UAAGAACAUUAUUCAAUUUAGCAGCCGAAAGG | 539 |
| 0276 | 36-mer | CUGC | |
| CD274- | Unmodified | AGAACAUUAUUCAAUUUGUAGCAGCCGAAAGG | 540 |
| 0278 | 36-mer | CUGC | |
| CD274- | Unmodified | GAACAUUAUUCAAUUUGUGAGCAGCCGAAAGG | 541 |
| 0279 | 36-mer | CUGC | |
| CD274- | Unmodified | AACAUUAUUCAAUUUGUGCAGCAGCCGAAAGGC | 542 |
| 0280 | 36-mer | UGC | |
| CD274- | Unmodified | ACAUUAUUCAAUUUGUGCAAGCAGCCGAAAGGC | 543 |
| 0281 | 36-mer | UGC | |
| CD274- | Unmodified | UAUUCAAUUUGUGCAUGGAAGCAGCCGAAAGG | 544 |
| 0285 | 36-mer | CUGC | |
| CD274- | Unmodified | AGAGGAAGACCUGAAGGUUAGCAGCCGAAAGG | 545 |
| 0303 | 36-mer | CUGC | |
| CD274- | Unmodified | AGGAAGACCUGAAGGUUCAAGCAGCCGAAAGGC | 546 |
| 0305 | 36-mer | UGC | |
| CD274- | Unmodified | AAGACCUGAAGGUUCAGCAAGCAGCCGAAAGGC | 547 |
| 0308 | 36-mer | UGC | |
| CD274- | Unmodified | AGACCUGAAGGUUCAGCAUAGCAGCCGAAAGGC | 548 |
| 0309 | 36-mer | UGC | |
| CD274- | Unmodified | GACCUGAAGGUUCAGCAUAAGCAGCCGAAAGGC | 549 |
| 0310 | 36-mer | UGC | |
| CD274- | Unmodified | CCUGAAGGUUCAGCAUAGUAGCAGCCGAAAGGC | 550 |
| 0312 | 36-mer | UGC | |
| CD274- | Unmodified | CUGAAGGUUCAGCAUAGUAAGCAGCCGAAAGGC | 551 |
| 0313 | 36-mer | UGC | |
| CD274- | Unmodified | AGAUCACAGAUGUGAAAUUAGCAGCCGAAAGG | 552 |
| 0392 | 36-mer | CUGC | |
| CD274- | Unmodified | UCACAGAUGUGAAAUUGCAAGCAGCCGAAAGGC | 553 |
| 0395 | 36-mer | UGC | |
| CD274- | Unmodified | CAGAUGUGAAAUUGCAGGAAGCAGCCGAAAGG | 554 |
| 0398 | 36-mer | CUGC | |
| CD274- | Unmodified | ACAAAAUCAACCAAAGAAUAGCAGCCGAAAGGC | 555 |
| 0497 | 36-mer | UGC | |
| CD274- | Unmodified | AAAAUCAACCAAAGAAUUUAGCAGCCGAAAGGC | 556 |
| 0499 | 36-mer | UGC | |
| CD274- | Unmodified | AAAUCAACCAAAGAAUUUUAGCAGCCGAAAGGC | 557 |
| 0500 | 36-mer | UGC | |
| CD274- | Unmodified | AAUCAACCAAAGAAUUUUGAGCAGCCGAAAGGC | 558 |
| 0501 | 36-mer | UGC | |
| CD274- | Unmodified | AUCAACCAAAGAAUUUUGGAGCAGCCGAAAGGC | 559 |
| 0502 | 36-mer | UGC | |
| CD274- | Unmodified | CAACCAAAGAAUUUUGGUUAGCAGCCGAAAGGC | 560 |
| 0504 | 36-mer | UGC | |
| CD274- | Unmodified | AACCAAAGAAUUUUGGUUGAGCAGCCGAAAGG | 561 |
| 0505 | 36-mer | CUGC | |
| CD274- | Unmodified | ACCAAAGAAUUUUGGUUGUAGCAGCCGAAAGG | 562 |
| 0506 | 36-mer | CUGC | |
| CD274- | Unmodified | CCAAAGAAUUUUGGUUGUGAGCAGCCGAAAGG | 563 |
| 0507 | 36-mer | CUGC | |
| CD274- | Unmodified | AAAGAAUUUUGGUUGUGGAAGCAGCCGAAAGG | 564 |
| 0509 | 36-mer | CUGC | |
| CD274- | Unmodified | AAGAAUUUUGGUUGUGGAUAGCAGCCGAAAGG | 565 |
| 0510 | 36-mer | CUGC | |
| CD274- | Unmodified | AGAAUUUUGGUUGUGGAUCAGCAGCCGAAAGG | 566 |
| 0511 | 36-mer | CUGC | |
| CD274- | Unmodified | AAUUUUGGUUGUGGAUCCAAGCAGCCGAAAGG | 567 |
| 0513 | 36-mer | CUGC | |
| CD274- | Unmodified | ACCUCUGAACAUGAACUGAAGCAGCCGAAAGGC | 568 |
| 0535 | 36-mer | UGC | |
| CD274- | Unmodified | CUCUGAACAUGAACUGACAAGCAGCCGAAAGGC | 569 |
| 0537 | 36-mer | UGC | |
| CD274- | Unmodified | AACAUGAACUGACAUGUCAAGCAGCCGAAAGGC | 570 |
| 0542 | 36-mer | UGC | |
| CD274- | Unmodified | GAAGUCAUCUGGACAAGCAAGCAGCCGAAAGGC | 571 |
| 0583 | 36-mer | UGC | |
| CD274- | Unmodified | GACAAGCAGUGACCAUCAAAGCAGCCGAAAGGC | 572 |
| 0594 | 36-mer | UGC | |
| CD274- | Unmodified | AGUGACCAUCAAGUCCUGAAGCAGCCGAAAGGC | 573 |
| 0601 | 36-mer | UGC | |
| CD274- | Unmodified | GGAGAAGCUUUUCAAUGUGAGCAGCCGAAAGG | 574 |
| 0654 | 36-mer | CUGC | |
| CD274- | Unmodified | GAGAAGCUUUUCAAUGUGAAGCAGCCGAAAGG | 575 |
| 0655 | 36-mer | CUGC | |
| CD274- | Unmodified | AGAAGCUUUUCAAUGUGACAGCAGCCGAAAGGC | 576 |
| 0656 | 36-mer | UGC | |
| CD274- | Unmodified | AAGCUUUUCAAUGUGACCAAGCAGCCGAAAGGC | 577 |
| 0658 | 36-mer | UGC | |
| CD274- | Unmodified | CUUUUCAAUGUGACCAGCAAGCAGCCGAAAGGC | 578 |
| 0661 | 36-mer | UGC | |
| CD274- | Unmodified | AAUGUGACCAGCACACUGAAGCAGCCGAAAGGC | 579 |
| 0667 | 36-mer | UGC | |
| CD274- | Unmodified | AGCACACUGAGAAUCAACAAGCAGCCGAAAGGC | 580 |
| 0676 | 36-mer | UGC | |
| CD274- | Unmodified | ACACUGAGAAUCAACACAAAGCAGCCGAAAGGC | 581 |
| 0679 | 36-mer | UGC | |
| CD274- | Unmodified | ACUGAGAAUCAACACAACAAGCAGCCGAAAGGC | 582 |
| 0681 | 36-mer | UGC | |
| CD274- | Unmodified | AGAAUCAACACAACAACUAAGCAGCCGAAAGGC | 583 |
| 0685 | 36-mer | UGC | |
| CD274- | Unmodified | ACACAACAACUAAUGAGAUAGCAGCCGAAAGGC | 584 |
| 0692 | 36-mer | UGC | |
| CD274- | Unmodified | CAACAACUAAUGAGAUUUUAGCAGCCGAAAGGC | 585 |
| 0695 | 36-mer | UGC | |
| CD274- | Unmodified | AACAACUAAUGAGAUUUUCAGCAGCCGAAAGGC | 586 |
| 0696 | 36-mer | UGC | |
| CD274- | Unmodified | CAACUAAUGAGAUUUUCUAAGCAGCCGAAAGGC | 587 |
| 0698 | 36-mer | UGC | |
| CD274- | Unmodified | AAUGAGAUUUUCUACUGCAAGCAGCCGAAAGGC | 588 |
| 0703 | 36-mer | UGC | |
| CD274- | Unmodified | AUUUUCUACUGCACUUUUAAGCAGCCGAAAGGC | 589 |
| 0709 | 36-mer | UGC | |
| CD274- | Unmodified | GAAAACCAUACAGCUGAAUAGCAGCCGAAAGGC | 590 |
| 0745 | 36-mer | UGC | |
| CD274- | Unmodified | ACCAUACAGCUGAAUUGGUAGCAGCCGAAAGGC | 591 |
| 0749 | 36-mer | UGC | |
| CD274- | Unmodified | AUACAGCUGAAUUGGUCAUAGCAGCCGAAAGGC | 592 |
| 0752 | 36-mer | UGC | |
| CD274- | Unmodified | AUGAAAGGACUCACUUGGUAGCAGCCGAAAGGC | 593 |
| 0800 | 36-mer | UGC | |
| CD274- | Unmodified | AAGGACUCACUUGGUAAUUAGCAGCCGAAAGGC | 594 |
| 0804 | 36-mer | UGC | |
| CD274- | Unmodified | GGUGUAGCACUGACAUUCAAGCAGCCGAAAGGC | 595 |
| 0847 | 36-mer | UGC | |
| CD274- | Unmodified | AGCACUGACAUUCAUCUUCAGCAGCCGAAAGGC | 596 |
| 0852 | 36-mer | UGC | |
| CD274- | Unmodified | AUGAUGGAUGUGAAAAAAUAGCAGCCGAAAGG | 597 |
| 0889 | 36-mer | CUGC | |
| CD274- | Unmodified | GGAGACCUUGAUACUUUCAAGCAGCCGAAAGGC | 598 |
| 1172 | 36-mer | UGC | |
| CD274- | Unmodified | GAGACCUUGAUACUUUCAAAGCAGCCGAAAGGC | 599 |
| 1173 | 36-mer | UGC | |
| CD274- | Unmodified | AGACCUUGAUACUUUCAAAAGCAGCCGAAAGGC | 600 |
| 1174 | 36-mer | UGC | |
| CD274- | Unmodified | ACCUUGAUACUUUCAAAUGAGCAGCCGAAAGGC | 601 |
| 1176 | 36-mer | UGC | |
| CD274- | Unmodified | CUUGAUACUUUCAAAUGCCAGCAGCCGAAAGGC | 602 |
| 1178 | 36-mer | UGC | |
| CD274- | Unmodified | GAAAGGAUACUUCUGAACAAGCAGCCGAAAGGC | 603 |
| 1227 | 36-mer | UGC | |
| CD274- | Unmodified | GGAUACUUCUGAACAAGGAAGCAGCCGAAAGGC | 604 |
| 1231 | 36-mer | UGC | |
| CD274- | Unmodified | CUAUUUAUUUUGAGUCUGUAGCAGCCGAAAGG | 605 |
| 1423 | 36-mer | CUGC | |
| CD274- | Unmodified | AUUUAUUUUGAGUCUGUGAAGCAGCCGAAAGG | 606 |
| 1425 | 36-mer | CUGC | |
| CD274- | Unmodified | UGAGUGUGGUUGUGAAUGAAGCAGCCGAAAGG | 607 |
| 1459 | 36-mer | CUGC | |
| CD274- | Unmodified | GAGUGUGGUUGUGAAUGAUAGCAGCCGAAAGG | 608 |
| 1460 | 36-mer | CUGC | |
| CD274- | Unmodified | AGUGUGGUUGUGAAUGAUUAGCAGCCGAAAGG | 609 |
| 1461 | 36-mer | CUGC | |
| CD274- | Unmodified | GUGUGGUUGUGAAUGAUUUAGCAGCCGAAAGG | 610 |
| 1462 | 36-mer | CUGC | |
| CD274- | Unmodified | UGUGGUUGUGAAUGAUUUCAGCAGCCGAAAGG | 611 |
| 1463 | 36-mer | CUGC | |
| CD274- | Unmodified | GUGGUUGUGAAUGAUUUCUAGCAGCCGAAAGG | 612 |
| 1464 | 36-mer | CUGC | |
| CD274- | Unmodified | UGGUUGUGAAUGAUUUCUUAGCAGCCGAAAGG | 613 |
| 1465 | 36-mer | CUGC | |
| CD274- | Unmodified | GUUGUGAAUGAUUUCUUUUAGCAGCCGAAAGG | 614 |
| 1467 | 36-mer | CUGC | |
| CD274- | Unmodified | UGUGAAUGAUUUCUUUUGAAGCAGCCGAAAGG | 615 |
| 1469 | 36-mer | CUGC | |
| CD274- | Unmodified | GUGAAUGAUUUCUUUUGAAAGCAGCCGAAAGG | 616 |
| 1470 | 36-mer | CUGC | |
| CD274- | Unmodified | AAUGAUUUCUUUUGAAGAUAGCAGCCGAAAGG | 617 |
| 1473 | 36-mer | CUGC | |
| CD274- | Unmodified | AUGAUUUCUUUUGAAGAUAAGCAGCCGAAAGG | 618 |
| 1474 | 36-mer | CUGC | |
| CD274- | Unmodified | CUUUUGAAGAUAUAUUGUAAGCAGCCGAAAGG | 619 |
| 1481 | 36-mer | CUGC | |
| CD274- | Unmodified | UUGAAGAUAUAUUGUAGUAAGCAGCCGAAAGG | 620 |
| 1484 | 36-mer | CUGC | |
| CD274- | Unmodified | GAAGAUAUAUUGUAGUAGAAGCAGCCGAAAGG | 621 |
| 1486 | 36-mer | CUGC | |
| CD274- | Unmodified | AGUAGAUGUUACAAUUUUGAGCAGCCGAAAGG | 622 |
| 1499 | 36-mer | CUGC | |
| CD274- | Unmodified | GUAGAUGUUACAAUUUUGUAGCAGCCGAAAGG | 623 |
| 1500 | 36-mer | CUGC | |
| CD274- | Unmodified | AAUGAUUUGCUCACAUCUAAGCAGCCGAAAGGC | 624 |
| 1541 | 36-mer | UGC | |
| CD274- | Unmodified | AAAACAUGGAGUAUUUGUAAGCAGCCGAAAGG | 625 |
| 1562 | 36-mer | CUGC | |
| CD274- | Unmodified | CAAGUAUACAUUGGAAGCAAGCAGCCGAAAGGC | 626 |
| 1606 | 36-mer | UGC | |
| CD274- | Unmodified | AAGUAUACAUUGGAAGCAUAGCAGCCGAAAGG | 627 |
| 1607 | 36-mer | CUGC | |
| CD274- | Unmodified | AGGAUGUCACCUUUAUUUAAGCAGCCGAAAGGC | 628 |
| 1649 | 36-mer | UGC | |
| CD274- | Unmodified | CUGUUCCAUUUAAAUAUCAAGCAGCCGAAAGGC | 629 |
| 1728 | 36-mer | UGC | |
| CD274- | Unmodified | UGUAACCACCCUGUUGUGAAGCAGCCGAAAGGC | 630 |
| 1794 | 36-mer | UGC | |
| CD274- | Unmodified | GUAACCACCCUGUUGUGAUAGCAGCCGAAAGGC | 63 |
| 1795 | 36-mer | UGC | |
| CD274- | Unmodified | GUUGUGAUAACCACUAUUAAGCAGCCGAAAGGC | 632 |
| 1806 | 36-mer | UGC | |
| CD274- | Unmodified | UUGUGAUAACCACUAUUAUAGCAGCCGAAAGGC | 633 |
| 1807 | 36-mer | UGC | |
| CD274- | Unmodified | UGUGAUAACCACUAUUAUUAGCAGCCGAAAGGC | 634 |
| 1808 | 36-mer | UGC | |
| CD274- | Unmodified | GUGAUAACCACUAUUAUUUAGCAGCCGAAAGGC | 635 |
| 1809 | 36-mer | UGC | |
| CD274- | Unmodified | UGAUAACCACUAUUAUUUUAGCAGCCGAAAGGC | 636 |
| 1810 | 36-mer | UGC | |
| CD274- | Unmodified | GAUAACCACUAUUAUUUUAAGCAGCCGAAAGGC | 637 |
| 1811 | 36-mer | UGC | |
| CD274- | Unmodified | AUAACCACUAUUAUUUUACAGCAGCCGAAAGGC | 638 |
| 1812 | 36-mer | UGC | |
| CD274- | Unmodified | CCACUGUCCUUUUAUAAUAAGCAGCCGAAAGGC | 639 |
| 1906 | 36-mer | UGC | |
| CD274- | Unmodified | CACUGUCCUUUUAUAAUACAGCAGCCGAAAGGC | 640 |
| 1907 | 36-mer | UGC | |
| CD274- | Unmodified | ACUGUCCUUUUAUAAUACAAGCAGCCGAAAGGC | 641 |
| 1908 | 36-mer | UGC | |
| CD274- | Unmodified | CUGUCCUUUUAUAAUACAAAGCAGCCGAAAGGC | 642 |
| 1909 | 36-mer | UGC | |
| CD274- | Unmodified | UGUCCUUUUAUAAUACAAUAGCAGCCGAAAGGC | 643 |
| 1910 | 36-mer | UGC | |
| CD274- | Unmodified | CCUUUUAUAAUACAAUUUAAGCAGCCGAAAGGC | 644 |
| 1913 | 36-mer | UGC | |
| CD274- | Unmodified | UUUUAUAAUACAAUUUACAAGCAGCCGAAAGG | 645 |
| 1915 | 36-mer | CUGC | |
| CD274- | Unmodified | AUAAUACAAUUUACAGCUAAGCAGCCGAAAGGC | 646 |
| 1919 | 36-mer | UGC | |
| CD274- | Unmodified | ACAGCUAUAUUUUACUUUAAGCAGCCGAAAGGC | 647 |
| 1931 | 36-mer | UGC | |
| CD274- | Unmodified | CUAUAUUUUACUUUAAGCAAGCAGCCGAAAGGC | 648 |
| 1935 | 36-mer | UGC | |
| CD274- | Unmodified | AUAUUUUACUUUAAGCAAUAGCAGCCGAAAGG | 649 |
| 1937 | 36-mer | CUGC | |
| CD274- | Unmodified | AUUGAAUCUACAGAUGUGAAGCAGCCGAAAGG | 650 |
| 2014 | 36-mer | CUGC | |
| CD274- | Unmodified | GAAAAUGUAUUAUUACAAUAGCAGCCGAAAGG | 651 |
| 2088 | 36-mer | CUGC | |
| CD274- | Unmodified | AUAAUCAGAGUAAUUUUCAAGCAGCCGAAAGG | 652 |
| 2221 | 36-mer | CUGC | |
| CD274- | Unmodified | UCAGAGUAAUUUUCAUUUAAGCAGCCGAAAGG | 653 |
| 2225 | 36-mer | CUGC | |
| CD274- | Unmodified | AGAGUAAUUUUCAUUUACAAGCAGCCGAAAGG | 654 |
| 2227 | 36-mer | CUGC | |
| CD274- | Unmodified | GAGUAAUUUUCAUUUACAAAGCAGCCGAAAGG | 655 |
| 2228 | 36-mer | CUGC | |
| CD274- | Unmodified | AGUAAUUUUCAUUUACAAAAGCAGCCGAAAGG | 656 |
| 2229 | 36-mer | CUGC | |
| CD274- | Unmodified | UAAUUUUCAUUUACAAAGAAGCAGCCGAAAGG | 657 |
| 2231 | 36-mer | CUGC | |
| CD274- | Unmodified | AUUUUCAUUUACAAAGAGAAGCAGCCGAAAGG | 658 |
| 2233 | 36-mer | CUGC | |
| CD274- | Unmodified | AAAAUAACCCUGAAAAAUAAGCAGCCGAAAGGC | 659 |
| 2263 | 36-mer | UGC | |
| CD274- | Unmodified | AUAACCCUGAAAAAUAACAAGCAGCCGAAAGGC | 660 |
| 2266 | 36-mer | UGC | |
| CD274- | Unmodified | AUAUAAUCUAAUGCUUGUUAGCAGCCGAAAGG | 661 |
| 2333 | 36-mer | CUGC | |
| CD274- | Unmodified | AUAAUCUAAUGCUUGUUUAAGCAGCCGAAAGG | 662 |
| 2335 | 36-mer | CUGC | |
| CD274- | Unmodified | AAUCUAAUGCUUGUUUAUAAGCAGCCGAAAGG | 663 |
| 2337 | 36-mer | CUGC | |
| CD274- | Unmodified | AUCUAAUGCUUGUUUAUAUAGCAGCCGAAAGG | 664 |
| 2338 | 36-mer | CUGC | |
| CD274- | Unmodified | UCUAAUGCUUGUUUAUAUAAGCAGCCGAAAGG | 665 |
| 2339 | 36-mer | CUGC | |
| CD274- | Unmodified | UAAUGCUUGUUUAUAUAGUAGCAGCCGAAAGG | 666 |
| 2341 | 36-mer | CUGC | |
| CD274- | Unmodified | AUGCUUGUUUAUAUAGUGUAGCAGCCGAAAGG | 667 |
| 2343 | 36-mer | CUGC | |
| CD274- | Unmodified | CUGGUAUUGUUUAACAGUUAGCAGCCGAAAGG | 668 |
| 2362 | 36-mer | CUGC | |
| CD274- | Unmodified | UGGUAUUGUUUAACAGUUCAGCAGCCGAAAGG | 669 |
| 2363 | 36-mer | CUGC | |
| CD274- | Unmodified | AAUUUUAAAUUCAUACCUUAGCAGCCGAAAGGC | 670 |
| 2407 | 36-mer | UGC | |
| CD274- | Unmodified | AGUCUACAUUUGGAAAUGUAGCAGCCGAAAGG | 671 |
| 2556 | 36-mer | CUGC | |
| CD274- | Unmodified | GUCUACAUUUGGAAAUGUAAGCAGCCGAAAGG | 672 |
| 2557 | 36-mer | CUGC | |
| CD274- | Unmodified | ACAUUUGGAAAUGUAUGUUAGCAGCCGAAAGG | 673 |
| 2561 | 36-mer | CUGC | |
| CD274- | Unmodified | CAUUUGGAAAUGUAUGUUAAGCAGCCGAAAGG | 674 |
| 2562 | 36-mer | CUGC | |
| CD274- | Unmodified | AUUUGGAAAUGUAUGUUAAAGCAGCCGAAAGG | 675 |
| 2563 | 36-mer | CUGC | |
| CD274- | Unmodified | UUGGAAAUGUAUGUUAAAAAGCAGCCGAAAGG | 676 |
| 2565 | 36-mer | CUGC | |
| CD274- | Unmodified | GAAAUGUAUGUUAAAAGCAAGCAGCCGAAAGG | 677 |
| 2568 | 36-mer | CUGC | |
| CD274- | Unmodified | CUGUGUACUUUGCUAUUUUAGCAGCCGAAAGGC | 678 |
| 2634 | 36-mer | UGC | |
| CD274- | Unmodified | GUGUACUUUGCUAUUUUUAAGCAGCCGAAAGG | 679 |
| 2636 | 36-mer | CUGC | |
| CD274- | Unmodified | UGUACUUUGCUAUUUUUAUAGCAGCCGAAAGG | 680 |
| 2637 | 36-mer | CUGC | |
| CD274- | Unmodified | ACUUUGCUAUUUUUAUUUAAGCAGCCGAAAGG | 681 |
| 2640 | 36-mer | CUGC | |
| CD274- | Unmodified | AUAUAGCAGAUGGAAUGAAAGCAGCCGAAAGG | 682 |
| 2673 | 36-mer | CUGC | |
| CD274- | Unmodified | GCAGAUGGAAUGAAUUUGAAGCAGCCGAAAGG | 683 |
| 2678 | 36-mer | CUGC | |
| CD274- | Unmodified | CAGAUGGAAUGAAUUUGAAAGCAGCCGAAAGG | 684 |
| 2679 | 36-mer | CUGC | |
| CD274- | Unmodified | AUAUACAUUUAGACAACCAAGCAGCCGAAAGGC | 685 |
| 2801 | 36-mer | UGC | |
| CD274- | Unmodified | AACCACCAUUUGUUAAGUAAGCAGCCGAAAGGC | 686 |
| 2815 | 36-mer | UGC | |
| CD274- | Unmodified | ACCAUUUGUUAAGUAUUUGAGCAGCCGAAAGG | 687 |
| 2819 | 36-mer | CUGC | |
| CD274- | Unmodified | AAAAGCAAUCUUAUUAUUAAGCAGCCGAAAGG | 688 |
| 2924 | 36-mer | CUGC | |
| CD274- | Unmodified | UAUUAUUAACUCUGUAUGAAGCAGCCGAAAGG | 689 |
| 2935 | 36-mer | CUGC | |
| CD274- | Unmodified | AUUAUUAACUCUGUAUGACAGCAGCCGAAAGGC | 690 |
| 2936 | 36-mer | UGC | |
| CD274- | Unmodified | UUAUUAACUCUGUAUGACAAGCAGCCGAAAGGC | 691 |
| 2937 | 36-mer | UGC | |
| CD274- | Unmodified | AUUAACUCUGUAUGACAGAAGCAGCCGAAAGGC | 692 |
| 2939 | 36-mer | UGC | |
| CD274- | Unmodified | AGUAUAAACUUCACUUUGAAGCAGCCGAAAGGC | 693 |
| 2994 | 36-mer | UGC | |
| CD274- | Unmodified | CUGUACUUGCAAAAUCACAAGCAGCCGAAAGGC | 694 |
| 3015 | 36-mer | UGC | |
| CD274- | Unmodified | ACUUGCAAAAUCACAUUUUAGCAGCCGAAAGGC | 695 |
| 3019 | 36-mer | UGC | |
| CD274- | Unmodified | CCUCAUUCGUUGUGCUUGAAGCAGCCGAAAGGC | 696 |
| 3094 | 36-mer | UGC | |
| CD274- | Unmodified | CUCAUUCGUUGUGCUUGAAAGCAGCCGAAAGGC | 697 |
| 3095 | 36-mer | UGC | |
| CD274- | Unmodified | CUUGUGUUAUCUGUUUGUAAGCAGCCGAAAGG | 698 |
| 3305 | 36-mer | CUGC | |
| CD274- | Unmodified | UUGUGUUAUCUGUUUGUACAGCAGCCGAAAGG | 699 |
| 3306 | 36-mer | CUGC | |
| CD274- | Unmodified | UGUGUUAUCUGUUUGUACAAGCAGCCGAAAGG | 700 |
| 3307 | 36-mer | CUGC | |
| CD274- | Unmodified | GUGUUAUCUGUUUGUACAUAGCAGCCGAAAGG | 701 |
| 3308 | 36-mer | CUGC | |
| CD274- | Unmodified | GUUAUCUGUUUGUACAUGUAGCAGCCGAAAGG | 702 |
| 3310 | 36-mer | CUGC | |
| CD274- | Unmodified | UUGUACAUGUGCAUUUGUAAGCAGCCGAAAGG | 703 |
| 3319 | 36-mer | CUGC | |
| CD274- | Unmodified | AUGUGCAUUUGUACAGUAAAGCAGCCGAAAGG | 704 |
| 3325 | 36-mer | CUGC | |
| CD274- | Unmodified | GUGUUCUUUGUGUGAAUUAAGCAGCCGAAAGG | 705 |
| 3355 | 36-mer | CUGC | |
| CD274- | Unmodified | GUUCUUUGUGUGAAUUACAAGCAGCCGAAAGG | 706 |
| 3357 | 36-mer | CUGC | |
| CD274- | Unmodified | UUGUGGUGUUGGAUUUGUAAGCAGCCGAAAGG | 707 |
| 3441 | 36-mer | CUGC | |
| CD274- | Unmodified | AUUCUGCAUUUGAUUGUCAAGCAGCCGAAAGGC | 708 |
| 3522 | 36-mer | UGC | |
| CD274- | Unmodified | CAUUUGAUUGUCACUUUUUAGCAGCCGAAAGGC | 709 |
| 3528 | 36-mer | UGC | |
| CD274- | Unmodified | UUGAUUGUCACUUUUUGUAAGCAGCCGAAAGG | 710 |
| 3531 | 36-mer | CUGC | |
| CD274- | Unmodified | UGAUUGUCACUUUUUGUACAGCAGCCGAAAGGC | 711 |
| 3532 | 36-mer | UGC | |
| CD274- | Unmodified | AUUGUCACUUUUUGUACCUAGCAGCCGAAAGGC | 712 |
| 3534 | 36-mer | UGC | |
| CD274- | Unmodified | CUUUUUGUACCUGCAUUAAAGCAGCCGAAAGGC | 713 |
| 3541 | 36-mer | UGC | |
| CD274- | Unmodified | UUUUUGUACCUGCAUUAAUAGCAGCCGAAAGGC | 714 |
| 3542 | 36-mer | UGC | |
| CD274- | Unmodified | UUGUACCUGCAUUAAUUUAAGCAGCCGAAAGGC | 715 |
| 3545 | 36-mer | UGC | |
| CD274- | Unmodified | UGUACCUGCAUUAAUUUAAAGCAGCCGAAAGGC | 716 |
| 3546 | 36-mer | UGC | |
| CD274- | Unmodified | AUAUUCUUAUUUAUUUUGUAGCAGCCGAAAGG | 717 |
| 3569 | 36-mer | CUGC | |
| CD274- | Unmodified | AUUUAUUUUGUUACUUGGUAGCAGCCGAAAGG | 718 |
| 3577 | 36-mer | CUGC | |
| CD274- | Unmodified | UUUAUUUUGUUACUUGGUAAGCAGCCGAAAGG | 719 |
| 3578 | 36-mer | CUGC | |
| CD274- | Unmodified | UAUUUUGUUACUUGGUACAAGCAGCCGAAAGG | 720 |
| 3580 | 36-mer | CUGC | |
| CD274- | Unmodified | AUGUCCAUUUUCUUGUUUAAGCAGCCGAAAGGC | 721 |
| 3604 | 36-mer | UGC | |
| CD274- | Unmodified | AUUUUCUUGUUUAUUUUGUAGCAGCCGAAAGG | 722 |
| 3610 | 36-mer | CUGC | |
| CD274- | Unmodified | AUUUUGUGUUUAAUAAAAUAGCAGCCGAAAGG | 723 |
| 3622 | 36-mer | CUGC | |
| CD274- | Unmodified | UCAAAUAUCCUCAUCUUUCUGG | 724 |
| 0088 | 22-mer | | |
| CD274- | Unmodified | UAGACAGCAAAUAUCCUCAUGG | 725 |
| 0094 | 22-mer | | |
| CD274- | Unmodified | UUAAAGACAGCAAAUAUCCUGG | 727 |
| 0097 | 22-mer | | |
| CD274- | Unmodified | UAUAAAGACAGCAAAUAUCCGG | 728 |
| 0098 | 22-mer | | |
| CD274- | Unmodified | UAUAUAAAGACAGCAAAUAUGG | 729 |
| 0100 | 22-mer | | |
| CD274- | Unmodified | UGAAUAUAAAGACAGCAAAUGG | 730 |
| 0102 | 22-mer | | |
| CD274- | Unmodified | UUCUACCACAUAUAGGUCCUGG | 731 |
| 0167 | 22-mer | | |
| CD274- | Unmodified | UAUUCAAUUGUCAUAUUGCUGG | 732 |
| 0193 | 22-mer | | |
| CD274- | Unmodified | UCAUUCAAUUGUCAUAUUGCGG | 733 |
| 0194 | 22-mer | | |
| CD274- | Unmodified | UUUGCAUUCAAUUGUCAUAUGG | 734 |
| 0197 | 22-mer | | |
| CD274- | Unmodified | UAAUUUGCAUUCAAUUGUCAGG | 735 |
| 0200 | 22-mer | | |
| CD274- | Unmodified | UUGGGAAUUUGCAUUCAAUUGG | 736 |
| 0204 | 22-mer | | |
| CD274- | Unmodified | UUAAUUGUUUUUCUACUGGGGG | 737 |
| 0219 | 22-mer | | |
| CD274- | Unmodified | UGUCUAAUUGUUUUUCUACUGG | 738 |
| 0222 | 22-mer | | |
| CD274- | Unmodified | UCAGGUCUAAUUGUUUUUCUGG | 739 |
| 0225 | 22-mer | | |
| CD274- | Unmodified | UUAAUGUUCUUAUCCUCCAUGG | 740 |
| 0268 | 22-mer | | |
| CD274- | Unmodified | UAUAAUGUUCUUAUCCUCCAGG | 741 |
| 0269 | 22-mer | | |
| CD274- | Unmodified | UGAAUAAUGUUCUUAUCCUCGG | 742 |
| 0271 | 22-mer | | |
| CD274- | Unmodified | UAUUGAAUAAUGUUCUUAUCGG | 743 |
| 0274 | 22-mer | | |
| CD274- | Unmodified | UAAUUGAAUAAUGUUCUUAUGG | 744 |
| 0275 | 22-mer | | |
| CD274- | Unmodified | UCAAAUUGAAUAAUGUUCUUGG | 745 |
| 0277 | 22-mer | | |
| CD274- | Unmodified | UAUGCACAAAUUGAAUAAUGGG | 746 |
| 0282 | 22-mer | | |
| CD274- | Unmodified | UCAUGCACAAAUUGAAUAAUGG | 747 |
| 0283 | 22-mer | | |
| CD274- | Unmodified | UGCAAUUUCACAUCUGUGAUGG | 748 |
| 0394 | 22-mer | | |
| CD274- | Unmodified | UAUCCUGCAAUUUCACAUCUGG | 749 |
| 0399 | 22-mer | | |
| CD274- | Unmodified | UUCAUGUUCAGAGGUGACUGGG | 750 |
| 0530 | 22-mer | | |
| CD274- | Unmodified | UUUCAUGUUCAGAGGUGACUGG | 751 |
| 0531 | 22-mer | | |
| CD274- | Unmodified | UACAUUGAAAAGCUUCUCCUGG | 752 |
| 0653 | 22-mer | | |
| CD274- | Unmodified | UUGAUUCUCAGUGUGCUGGUGG | 753 |
| 0673 | 22-mer | | |
| CD274- | Unmodified | UAAUCUCAUUAGUUGUUGUGGG | 754 |
| 0693 | 22-mer | | |
| CD274- | Unmodified | UAGAAAAUCUCAUUAGUUGUGG | 755 |
| 0697 | 22-mer | | |
| CD274- | Unmodified | UAGUAGAAAAUCUCAUUAGUGG | 756 |
| 0700 | 22-mer | | |
| CD274- | Unmodified | UCAGUAGAAAAUCUCAUUAGGG | 757 |
| 0701 | 22-mer | | |
| CD274- | Unmodified | UUCAGCUGUAUGGUUUUCCUGG | 758 |
| 0743 | 22-mer | | |
| CD274- | Unmodified | UAAUUCAGCUGUAUGGUUUUGG | 759 |
| 0746 | 22-mer | | |
| CD274- | Unmodified | UAAGACAGCAAAUAUCCUCAGG | 760 |
| 0095 | 22-mer | | |
| CD274- | Unmodified | UUAUAAAGACAGCAAAUAUCGG | 761 |
| 0099 | 22-mer | | |
| CD274- | Unmodified | UUGAAUAUAAAGACAGCAAAGG | 762 |
| 0103 | 22-mer | | |
| CD274- | Unmodified | UGCAUUCAAUUGUCAUAUUGGG | 763 |
| 0195 | 22-mer | | |
| CD274- | Unmodified | UUGCAUUCAAUUGUCAUAUUGG | 764 |
| 0196 | 22-mer | | |
| CD274- | Unmodified | UUUUGCAUUCAAUUGUCAUAGG | 765 |
| 0198 | 22-mer | | |
| CD274- | Unmodified | UAUUUGCAUUCAAUUGUCAUGG | 766 |
| 0199 | 22-mer | | |
| CD274- | Unmodified | UGAAUUUGCAUUCAAUUGUCGG | 767 |
| 0201 | 22-mer | | |
| CD274- | Unmodified | UGGAAUUUGCAUUCAAUUGUGG | 768 |
| 0202 | 22-mer | | |
| CD274- | Unmodified | UUACUGGGAAUUUGCAUUCAGG | 769 |
| 0207 | 22-mer | | |
| CD274- | Unmodified | UUCUAAUUGUUUUUCUACUGGG | 770 |
| 0221 | 22-mer | | |
| CD274- | Unmodified | UCAAUAGACAAUUAGUGCAGGG | 771 |
| 0245 | 22-mer | | |
| CD274- | Unmodified | UUCCCAAUAGACAAUUAGUGGG | 772 |
| 0248 | 22-mer | | |
| CD274- | Unmodified | UUUCCCAAUAGACAAUUAGUGG | 773 |
| 0249 | 22-mer | | |
| CD274- | Unmodified | UUGUUCUUAUCCUCCAUUUCGG | 774 |
| 0265 | 22-mer | | |
| CD274- | Unmodified | UAUGUUCUUAUCCUCCAUUUGG | 775 |
| 0266 | 22-mer | | |
| CD274- | Unmodified | UAAUGUUCUUAUCCUCCAUUGG | 776 |
| 0267 | 22-mer | | |
| CD274- | Unmodified | UAAUAAUGUUCUUAUCCUCCGG | 777 |
| 0270 | 22-mer | | |
| CD274- | Unmodified | UUGAAUAAUGUUCUUAUCCUGG | 778 |
| 0272 | 22-mer | | |
| CD274- | Unmodified | UUUGAAUAAUGUUCUUAUCCGG | 779 |
| 0273 | 22-mer | | |
| CD274- | Unmodified | UAAAUUGAAUAAUGUUCUUAGG | 780 |
| 0276 | 22-mer | | |
| CD274- | Unmodified | UACAAAUUGAAUAAUGUUCUGG | 781 |
| 0278 | 22-mer | | |
| CD274- | Unmodified | UCACAAAUUGAAUAAUGUUCGG | 782 |
| 0279 | 22-mer | | |
| CD274- | Unmodified | UGCACAAAUUGAAUAAUGUUGG | 783 |
| 0280 | 22-mer | | |
| CD274- | Unmodified | UUGCACAAAUUGAAUAAUGUGG | 784 |
| 0281 | 22-mer | | |
| CD274- | Unmodified | UUCCAUGCACAAAUUGAAUAGG | 785 |
| 0285 | 22-mer | | |
| CD274- | Unmodified | UAACCUUCAGGUCUUCCUCUGG | 786 |
| 0303 | 22-mer | | |
| CD274- | Unmodified | UUGAACCUUCAGGUCUUCCUGG | 787 |
| 0305 | 22-mer | | |
| CD274- | Unmodified | UUGCUGAACCUUCAGGUCUUGG | 788 |
| 0308 | 22-mer | | |
| CD274- | Unmodified | UAUGCUGAACCUUCAGGUCUGG | 789 |
| 0309 | 22-mer | | |
| CD274- | Unmodified | UUAUGCUGAACCUUCAGGUCGG | 790 |
| 0310 | 22-mer | | |
| CD274- | Unmodified | UACUAUGCUGAACCUUCAGGGG | 791 |
| 0312 | 22-mer | | |
| CD274- | Unmodified | UUACUAUGCUGAACCUUCAGGG | 792 |
| 0313 | 22-mer | | |
| CD274- | Unmodified | UAAUUUCACAUCUGUGAUCUGG | 793 |
| 0392 | 22-mer | | |
| CD274- | Unmodified | UUGCAAUUUCACAUCUGUGAGG | 794 |
| 0395 | 22-mer | | |
| CD274- | Unmodified | UUCCUGCAAUUUCACAUCUGGG | 795 |
| 0398 | 22-mer | | |
| CD274- | Unmodified | UAUUCUUUGGUUGAUUUUGUGG | 796 |
| 0497 | 22-mer | | |
| CD274- | Unmodified | UAAAUUCUUUGGUUGAUUUUGG | 797 |
| 0499 | 22-mer | | |
| CD274- | Unmodified | UAAAAUUCUUUGGUUGAUUUGG | 798 |
| 0500 | 22-mer | | |
| CD274- | Unmodified | UCAAAAUUCUUUGGUUGAUUGG | 799 |
| 0501 | 22-mer | | |
| CD274- | Unmodified | UCCAAAAUUCUUUGGUUGAUGG | 800 |
| 0502 | 22-mer | | |
| CD274- | Unmodified | UAACCAAAAUUCUUUGGUUGGG | 801 |
| 0504 | 22-mer | | |
| CD274- | Unmodified | UCAACCAAAAUUCUUUGGUUGG | 802 |
| 0505 | 22-mer | | |
| CD274- | Unmodified | UACAACCAAAAUUCUUUGGUGG | 803 |
| 0506 | 22-mer | | |
| CD274- | Unmodified | UCACAACCAAAAUUCUUUGGGG | 804 |
| 0507 | 22-mer | | |
| CD274- | Unmodified | UUCCACAACCAAAAUUCUUUGG | 805 |
| 0509 | 22-mer | | |
| CD274- | Unmodified | UAUCCACAACCAAAAUUCUUGG | 806 |
| 0510 | 22-mer | | |
| CD274- | Unmodified | UGAUCCACAACCAAAAUUCUGG | 807 |
| 0511 | 22-mer | | |
| CD274- | Unmodified | UUGGAUCCACAACCAAAAUUGG | 808 |
| 0513 | 22-mer | | |
| CD274- | Unmodified | UUCAGUUCAUGUUCAGAGGUGG | 809 |
| 0535 | 22-mer | | |
| CD274- | Unmodified | UUGUCAGUUCAUGUUCAGAGGG | 810 |
| 0537 | 22-mer | | |
| CD274- | Unmodified | UUGACAUGUCAGUUCAUGUUGG | 811 |
| 0542 | 22-mer | | |
| CD274- | Unmodified | UUGCUUGUCCAGAUGACUUCGG | 812 |
| 0583 | 22-mer | | |
| CD274- | Unmodified | UUUGAUGGUCACUGCUUGUCGG | 813 |
| 0594 | 22-mer | | |
| CD274- | Unmodified | UUCAGGACUUGAUGGUCACUGG | 814 |
| 0601 | 22-mer | | |
| CD274- | Unmodified | UCACAUUGAAAAGCUUCUCCGG | 815 |
| 0654 | 22-mer | | |
| CD274- | Unmodified | UUCACAUUGAAAAGCUUCUCGG | 816 |
| 0655 | 22-mer | | |
| CD274- | Unmodified | UGUCACAUUGAAAAGCUUCUGG | 817 |
| 0656 | 22-mer | | |
| CD274- | Unmodified | UUGGUCACAUUGAAAAGCUUGG | 818 |
| 0658 | 22-mer | | |
| CD274- | Unmodified | UUGCUGGUCACAUUGAAAAGGG | 819 |
| 0661 | 22-mer | | |
| CD274- | Unmodified | UUCAGUGUGCUGGUCACAUUGG | 820 |
| 0667 | 22-mer | | |
| CD274- | Unmodified | UUGUUGAUUCUCAGUGUGCUGG | 821 |
| 0676 | 22-mer | | |
| CD274- | Unmodified | UUUGUGUUGAUUCUCAGUGUGG | 822 |
| 0679 | 22-mer | | |
| CD274- | Unmodified | UUGUUGUGUUGAUUCUCAGUGG | 823 |
| 0681 | 22-mer | | |
| CD274- | Unmodified | UUAGUUGUUGUGUUGAUUCUGG | 824 |
| 0685 | 22-mer | | |
| CD274- | Unmodified | UAUCUCAUUAGUUGUUGUGUGG | 825 |
| 0692 | 22-mer | | |
| CD274- | Unmodified | UAAAAUCUCAUUAGUUGUUGGG | 826 |
| 0695 | 22-mer | | |
| CD274- | Unmodified | UGAAAAUCUCAUUAGUUGUUGG | 827 |
| 0696 | 22-mer | | |
| CD274- | Unmodified | UUAGAAAAUCUCAUUAGUUGGG | 828 |
| 0698 | 22-mer | | |
| CD274- | Unmodified | UUGCAGUAGAAAAUCUCAUUGG | 829 |
| 0703 | 22-mer | | |
| CD274- | Unmodified | UUAAAAGUGCAGUAGAAAAUGG | 830 |
| 0709 | 22-mer | | |
| CD274- | Unmodified | UAUUCAGCUGUAUGGUUUUCGG | 831 |
| 0745 | 22-mer | | |
| CD274- | Unmodified | UACCAAUUCAGCUGUAUGGUGG | 832 |
| 0749 | 22-mer | | |
| CD274- | Unmodified | UAUGACCAAUUCAGCUGUAUGG | 833 |
| 0752 | 22-mer | | |
| CD274- | Unmodified | UACCAAGUGAGUCCUUUCAUGG | 834 |
| 0800 | 22-mer | | |
| CD274- | Unmodified | UAAUUACCAAGUGAGUCCUUGG | 835 |
| 0804 | 22-mer | | |
| CD274- | Unmodified | UUGAAUGUCAGUGCUACACCGG | 836 |
| 0847 | 22-mer | | |
| CD274- | Unmodified | UGAAGAUGAAUGUCAGUGCUGG | 837 |
| 0852 | 22-mer | | |
| CD274- | Unmodified | UAUUUUUUCACAUCCAUCAUGG | 838 |
| 0889 | 22-mer | | |
| CD274- | Unmodified | UUGAAAGUAUCAAGGUCUCCGG | 839 |
| 1172 | 22-mer | | |
| CD274- | Unmodified | UUUGAAAGUAUCAAGGUCUCGG | 840 |
| 1173 | 22-mer | | |
| CD274- | Unmodified | UUUUGAAAGUAUCAAGGUCUGG | 841 |
| 1174 | 22-mer | | |
| CD274- | Unmodified | UCAUUUGAAAGUAUCAAGGUGG | 842 |
| 1176 | 22-mer | | |
| CD274- | Unmodified | UGGCAUUUGAAAGUAUCAAGGG | 843 |
| 1178 | 22-mer | | |
| CD274- | Unmodified | UUGUUCAGAAGUAUCCUUUCGG | 844 |
| 1227 | 22-mer | | |
| CD274- | Unmodified | UUCCUUGUUCAGAAGUAUCCGG | 845 |
| 1231 | 22-mer | | |
| CD274- | Unmodified | UACAGACUCAAAAUAAAUAGGG | 846 |
| 1423 | 22-mer | | |
| CD274- | Unmodified | UUCACAGACUCAAAAUAAAUGG | 847 |
| 1425 | 22-mer | | |
| CD274- | Unmodified | UUCAUUCACAACCACACUCAGG | 848 |
| 1459 | 22-mer | | |
| CD274- | Unmodified | UAUCAUUCACAACCACACUCGG | 849 |
| 1460 | 22-mer | | |
| CD274- | Unmodified | UAAUCAUUCACAACCACACUGG | 850 |
| 1461 | 22-mer | | |
| CD274- | Unmodified | UAAAUCAUUCACAACCACACGG | 851 |
| 1462 | 22-mer | | |
| CD274- | Unmodified | UGAAAUCAUUCACAACCACAGG | 852 |
| 1463 | 22-mer | | |
| CD274- | Unmodified | UAGAAAUCAUUCACAACCACGG | 853 |
| 1464 | 22-mer | | |
| CD274- | Unmodified | UAAGAAAUCAUUCACAACCAGG | 854 |
| 1465 | 22-mer | | |
| CD274- | Unmodified | UAAAAGAAAUCAUUCACAACGG | 855 |
| 1467 | 22-mer | | |
| CD274- | Unmodified | UUCAAAAGAAAUCAUUCACAGG | 856 |
| 1469 | 22-mer | | |
| CD274- | Unmodified | UUUCAAAAGAAAUCAUUCACGG | 857 |
| 1470 | 22-mer | | |
| CD274- | Unmodified | UAUCUUCAAAAGAAAUCAUUGG | 858 |
| 1473 | 22-mer | | |
| CD274- | Unmodified | UUAUCUUCAAAAGAAAUCAUGG | 859 |
| 1474 | 22-mer | | |
| CD274- | Unmodified | UUACAAUAUAUCUUCAAAAGGG | 860 |
| 1481 | 22-mer | | |
| CD274- | Unmodified | UUACUACAAUAUAUCUUCAAGG | 861 |
| 1484 | 22-mer | | |
| CD274- | Unmodified | UUCUACUACAAUAUAUCUUCGG | 862 |
| 1486 | 22-mer | | |
| CD274- | Unmodified | UCAAAAUUGUAACAUCUACUGG | 863 |
| 1499 | 22-mer | | |
| CD274- | Unmodified | UACAAAAUUGUAACAUCUACGG | 864 |
| 1500 | 22-mer | | |
| CD274- | Unmodified | UUAGAUGUGAGCAAAUCAUUGG | 865 |
| 1541 | 22-mer | | |
| CD274- | Unmodified | UUACAAAUACUCCAUGUUUUGG | 866 |
| 1562 | 22-mer | | |
| CD274- | Unmodified | UUGCUUCCAAUGUAUACUUGGG | 867 |
| 1606 | 22-mer | | |
| CD274- | Unmodified | UAUGCUUCCAAUGUAUACUUGG | 868 |
| 1607 | 22-mer | | |
| CD274- | Unmodified | UUAAAUAAAGGUGACAUCCUGG | 869 |
| 1649 | 22-mer | | |
| CD274- | Unmodified | UUGAUAUUUAAAUGGAACAGGG | 870 |
| 1728 | 22-mer | | |
| CD274- | Unmodified | UUCACAACAGGGUGGUUACAGG | 871 |
| 1794 | 22-mer | | |
| CD274- | Unmodified | UAUCACAACAGGGUGGUUACGG | 872 |
| 1795 | 22-mer | | |
| CD274- | Unmodified | UUAAUAGUGGUUAUCACAACGG | 873 |
| 1806 | 22-mer | | |
| CD274- | Unmodified | UAUAAUAGUGGUUAUCACAAGG | 874 |
| 1807 | 22-mer | | |
| CD274- | Unmodified | UAAUAAUAGUGGUUAUCACAGG | 875 |
| 1808 | 22-mer | | |
| CD274- | Unmodified | UAAAUAAUAGUGGUUAUCACGG | 876 |
| 1809 | 22-mer | | |
| CD274- | Unmodified | UAAAAUAAUAGUGGUUAUCAGG | 877 |
| 1810 | 22-mer | | |
| CD274- | Unmodified | UUAAAAUAAUAGUGGUUAUCGG | 878 |
| 1811 | 22-mer | | |
| CD274- | Unmodified | UGUAAAAUAAUAGUGGUUAUGG | 879 |
| 1812 | 22-mer | | |
| CD274- | Unmodified | UUAUUAUAAAAGGACAGUGGGG | 880 |
| 1906 | 22-mer | | |
| CD274- | Unmodified | UGUAUUAUAAAAGGACAGUGGG | 881 |
| 1907 | 22-mer | | |
| CD274- | Unmodified | UUGUAUUAUAAAAGGACAGUGG | 882 |
| 1908 | 22-mer | | |
| CD274- | Unmodified | UUUGUAUUAUAAAAGGACAGGG | 883 |
| 1909 | 22-mer | | |
| CD274- | Unmodified | UAUUGUAUUAUAAAAGGACAGG | 884 |
| 1910 | 22-mer | | |
| CD274- | Unmodified | UUAAAUUGUAUUAUAAAAGGGG | 885 |
| 1913 | 22-mer | | |
| CD274- | Unmodified | UUGUAAAUUGUAUUAUAAAAGG | 886 |
| 1915 | 22-mer | | |
| CD274- | Unmodified | UUAGCUGUAAAUUGUAUUAUGG | 887 |
| 1919 | 22-mer | | |
| CD274- | Unmodified | UUAAAGUAAAAUAUAGCUGUGG | 888 |
| 1931 | 22-mer | | |
| CD274- | Unmodified | UUGCUUAAAGUAAAAUAUAGGG | 889 |
| 1935 | 22-mer | | |
| CD274- | Unmodified | UAUUGCUUAAAGUAAAAUAUGG | 890 |
| 1937 | 22-mer | | |
| CD274- | Unmodified | UUCACAUCUGUAGAUUCAAUGG | 891 |
| 2014 | 22-mer | | |
| CD274- | Unmodified | UAUUGUAAUAAUACAUUUUCGG | 892 |
| 2088 | 22-mer | | |
| CD274- | Unmodified | UUGAAAAUUACUCUGAUUAUGG | 893 |
| 2221 | 22-mer | | |
| CD274- | Unmodified | UUAAAUGAAAAUUACUCUGAGG | 894 |
| 2225 | 22-mer | | |
| CD274- | Unmodified | UUGUAAAUGAAAAUUACUCUGG | 895 |
| 2227 | 22-mer | | |
| CD274- | Unmodified | UUUGUAAAUGAAAAUUACUCGG | 896 |
| 2228 | 22-mer | | |
| CD274- | Unmodified | UUUUGUAAAUGAAAAUUACUGG | 897 |
| 2229 | 22-mer | | |
| CD274- | Unmodified | UUCUUUGUAAAUGAAAAUUAGG | 898 |
| 2231 | 22-mer | | |
| CD274- | Unmodified | UUCUCUUUGUAAAUGAAAAUGG | 899 |
| 2233 | 22-mer | | |
| CD274- | Unmodified | UUAUUUUUCAGGGUUAUUUUGG | 900 |
| 2263 | 22-mer | | |
| CD274- | Unmodified | UUGUUAUUUUUCAGGGUUAUGG | 901 |
| 2266 | 22-mer | | |
| CD274- | Unmodified | UAACAAGCAUUAGAUUAUAUGG | 902 |
| 2333 | 22-mer | | |
| CD274- | Unmodified | UUAAACAAGCAUUAGAUUAUGG | 903 |
| 2335 | 22-mer | | |
| CD274- | Unmodified | UUAUAAACAAGCAUUAGAUUGG | 904 |
| 2337 | 22-mer | | |
| CD274- | Unmodified | UAUAUAAACAAGCAUUAGAUGG | 905 |
| 2338 | 22-mer | | |
| CD274- | Unmodified | UUAUAUAAACAAGCAUUAGAGG | 906 |
| 2339 | 22-mer | | |
| CD274- | Unmodified | UACUAUAUAAACAAGCAUUAGG | 907 |
| 2341 | 22-mer | | |
| CD274- | Unmodified | UACACUAUAUAAACAAGCAUGG | 908 |
| 2343 | 22-mer | | |
| CD274- | Unmodified | UAACUGUUAAACAAUACCAGGG | 909 |
| 2362 | 22-mer | | |
| CD274- | Unmodified | UGAACUGUUAAACAAUACCAGG | 910 |
| 2363 | 22-mer | | |
| CD274- | Unmodified | UAAGGUAUGAAUUUAAAAUUGG | 911 |
| 2407 | 22-mer | | |
| CD274- | Unmodified | UACAUUUCCAAAUGUAGACUGG | 912 |
| 2556 | 22-mer | | |
| CD274- | Unmodified | UUACAUUUCCAAAUGUAGACGG | 913 |
| 2557 | 22-mer | | |
| CD274- | Unmodified | UAACAUACAUUUCCAAAUGUGG | 914 |
| 2561 | 22-mer | | |
| CD274- | Unmodified | UUAACAUACAUUUCCAAAUGGG | 915 |
| 2562 | 22-mer | | |
| CD274- | Unmodified | UUUAACAUACAUUUCCAAAUGG | 916 |
| 2563 | 22-mer | | |
| CD274- | Unmodified | UUUUUAACAUACAUUUCCAAGG | 917 |
| 2565 | 22-mer | | |
| CD274- | Unmodified | UUGCUUUUAACAUACAUUUCGG | 918 |
| 2568 | 22-mer | | |
| CD274- | Unmodified | UAAAAUAGCAAAGUACACAGGG | 919 |
| 2634 | 22-mer | | |
| CD274- | Unmodified | UUAAAAAUAGCAAAGUACACGG | 920 |
| 2636 | 22-mer | | |
| CD274- | Unmodified | UAUAAAAAUAGCAAAGUACAGG | 921 |
| 2637 | 22-mer | | |
| CD274- | Unmodified | UUAAAUAAAAAUAGCAAAGUGG | 922 |
| 2640 | 22-mer | | |
| CD274- | Unmodified | UUUCAUUCCAUCUGCUAUAUGG | 923 |
| 2673 | 22-mer | | |
| CD274- | Unmodified | UUCAAAUUCAUUCCAUCUGCGG | 924 |
| 2678 | 22-mer | | |
| CD274- | Unmodified | UUUCAAAUUCAUUCCAUCUGGG | 925 |
| 2679 | 22-mer | | |
| CD274- | Unmodified | UUGGUUGUCUAAAUGUAUAUGG | 926 |
| 2801 | 22-mer | | |
| CD274- | Unmodified | UUACUUAACAAAUGGUGGUUGG | 927 |
| 2815 | 22-mer | | |
| CD274- | Unmodified | UCAAAUACUUAACAAAUGGUGG | 928 |
| 2819 | 22-mer | | |
| CD274- | Unmodified | UUAAUAAUAAGAUUGCUUUUGG | 929 |
| 2924 | 22-mer | | |
| CD274- | Unmodified | UUCAUACAGAGUUAAUAAUAGG | 930 |
| 2935 | 22-mer | | |
| CD274- | Unmodified | UGUCAUACAGAGUUAAUAAUGG | 931 |
| 2936 | 22-mer | | |
| CD274- | Unmodified | UUGUCAUACAGAGUUAAUAAGG | 932 |
| 2937 | 22-mer | | |
| CD274- | Unmodified | UUCUGUCAUACAGAGUUAAUGG | 933 |
| 2939 | 22-mer | | |
| CD274- | Unmodified | UUCAAAGUGAAGUUUAUACUGG | 934 |
| 2994 | 22-mer | | |
| CD274- | Unmodified | UUGUGAUUUUGCAAGUACAGGG | 935 |
| 3015 | 22-mer | | |
| CD274- | Unmodified | UAAAAUGUGAUUUUGCAAGUGG | 936 |
| 3019 | 22-mer | | |
| CD274- | Unmodified | UUCAAGCACAACGAAUGAGGGG | 937 |
| 3094 | 22-mer | | |
| CD274- | Unmodified | UUUCAAGCACAACGAAUGAGGG | 938 |
| 3095 | 22-mer | | |
| CD274- | Unmodified | UUACAAACAGAUAACACAAGGG | 939 |
| 3305 | 22-mer | | |
| CD274- | Unmodified | UGUACAAACAGAUAACACAAGG | 940 |
| 3306 | 22-mer | | |
| CD274- | Unmodified | UUGUACAAACAGAUAACACAGG | 941 |
| 3307 | 22-mer | | |
| CD274- | Unmodified | UAUGUACAAACAGAUAACACGG | 942 |
| 3308 | 22-mer | | |
| CD274- | Unmodified | UACAUGUACAAACAGAUAACGG | 943 |
| 3310 | 22-mer | | |
| CD274- | Unmodified | UUACAAAUGCACAUGUACAAGG | 944 |
| 3319 | 22-mer | | |
| CD274- | Unmodified | UUUACUGUACAAAUGCACAUGG | 945 |
| 3325 | 22-mer | | |
| CD274- | Unmodified | UUAAUUCACACAAAGAACACGG | 946 |
| 3355 | 22-mer | | |
| CD274- | Unmodified | UUGUAAUUCACACAAAGAACGG | 947 |
| 3357 | 22-mer | | |
| CD274- | Unmodified | UUACAAAUCCAACACCACAAGG | 948 |
| 3441 | 22-mer | | |
| CD274- | Unmodified | UUGACAAUCAAAUGCAGAAUGG | 949 |
| 3522 | 22-mer | | |
| CD274- | Unmodified | UAAAAAGUGACAAUCAAAUGGG | 950 |
| 3528 | 22-mer | | |
| CD274- | Unmodified | UUACAAAAAGUGACAAUCAAGG | 951 |
| 3531 | 22-mer | | |
| CD274- | Unmodified | UGUACAAAAAGUGACAAUCAGG | 952 |
| 3532 | 22-mer | | |
| CD274- | Unmodified | UAGGUACAAAAAGUGACAAUGG | 953 |
| 3534 | 22-mer | | |
| CD274- | Unmodified | UUUAAUGCAGGUACAAAAAGGG | 954 |
| 3541 | 22-mer | | |
| CD274- | Unmodified | UAUUAAUGCAGGUACAAAAAGG | 955 |
| 3542 | 22-mer | | |
| CD274- | Unmodified | UUAAAUUAAUGCAGGUACAAGG | 956 |
| 3545 | 22-mer | | |
| CD274- | Unmodified | UUUAAAUUAAUGCAGGUACAGG | 957 |
| 3546 | 22-mer | | |
| CD274- | Unmodified | UACAAAAUAAAUAAGAAUAUGG | 958 |
| 3569 | 22-mer | | |
| CD274- | Unmodified | UACCAAGUAACAAAAUAAAUGG | 959 |
| 3577 | 22-mer | | |
| CD274- | Unmodified | UUACCAAGUAACAAAAUAAAGG | 960 |
| 3578 | 22-mer | | |
| CD274- | Unmodified | UUGUACCAAGUAACAAAAUAGG | 961 |
| 3580 | 22-mer | | |
| CD274- | Unmodified | UUAAACAAGAAAAUGGACAUGG | 962 |
| 3604 | 22-mer | | |
| CD274- | Unmodified | UACAAAAUAAACAAGAAAAUGG | 963 |
| 3610 | 22-mer | | |
| CD274- | Unmodified | UAUUUUAUUAAACACAAAAUGG | 964 |
| 3622 | 22-mer | | |
| CD274- | Modified 36- | [mAs][mG][mA][mA][mA][mG][mA][fU][fG][fA][fG] | 965 |
| 0088 | mer | [mG][mA][mU][mA][mU][mU][mU][mG][mA][mG][mC] | |
| | | [mA][mG][mC][mC][mG][ademA-GalNAc][ademA- | |
| | | GalNAc][ademA- | |
| | | GalNAc][mG][mG][mC][mU][mG][mC] | |
| CD274- | Modified 36- | [mAs][mU][mG][mA][mG][mG][mA][fU][fA][fU][fU] | 966 |
| 0094 | mer | [mU][mG][mC][mU][mG][mU][mC][mU][mA][mG][mC] | |
| | | [mA][mG][mC][mC][mG][ademA-GalNAc][ademA- | |
| | | GalNAc][ademA- | |
| | | GalNAc][mG][mG][mC][mU][mG][mC] | |
| CD274- | Modified 36- | [mAs][mG][mG][mA][mU][mA][mU][fU][fU][fG][fC] | 968 |
| 0097 | mer | [mU][mG][mU][mC][mU][mU][mU][mA][mA][mG][mC] | |
| | | [mA][mG][mC][mC][mG][ademA-GalNAc][ademA- | |
| | | GalNAc][ademA- | |
| | | GalNAc][mG][mG][mC][mU][mG][mC] | |
| CD274- | Modified 36- | [mGs][mG][mA][mU][mA][mU][mU][fU][fG][fC][fU] | 969 |
| 0098 | mer | [mG][mU][mC][mU][mU][mU][mA][mU][mA][mG][mC] | |
| | | [mA][mG][mC][mC][mG][ademA-GalNAc][ademA- | |
| | | GalNAc][ademA- | |
| | | GalNAc][mG][mG][mC][mU][mG][mC] | |
| CD274- | Modified 36- | [mAs][mU][mA][mU][mU][mU][mG][fC][fU][fG][fU] | 970 |
| 0100 | mer | [mC][mU][mU][mU][mA][mU][mA][mU][mA][mG][mC] | |
| | | [mA][mG][mC][mC][mG][ademA-GalNAc][ademA- | |
| | | GalNAc][ademA- | |
| | | GalNAc][mG][mG][mC][mU][mG][mC] | |
| CD274- | Modified 36- | [mAs][mU][mU][mU][mG][mC][mU][fG][fU][fC][fU] | 971 |
| 0102 | mer | [mU][mU][mA][mU][mA][mU][mU][mC][mA][mG][mC] | |
| | | [mA][mG][mC][mC][mG][ademA-GalNAc][ademA- | |
| | | GalNAc][ademA- | |
| | | GalNAc][mG][mG][mC][mU][mG][mC] | |
| CD274- | Modified 36- | [mAs][mG][mG][mA][mC][mC][mU][fA][fU][fA][fU] | 972 |
| 0167 | mer | [mG][mU][mG][mG][mU][mA][mG][mA][mA][mG][mC] | |
| | | [mA][mG][mC][mC][mG][ademA-GalNAc][ademA- | |
| | | GalNAc][ademA- | |
| | | GalNAc][mG][mG][mC][mU][mG][mC] | |
| CD274- | Modified 36- | [mGs][mC][mA][mA][mU][mA][mU][fG][fA][fC][fA] | 973 |
| 0193 | mer | [mA][mU][mU][mG][mA][mA][mU][mG][mA][mG][mC] | |
| | | [mA][mG][mC][mC][mG][ademA-GalNAc][ademA- | |
| | | GalNAc][ademA- | |
| | | GalNAc][mG][mG][mC][mU][mG][mC] | |
| CD274- | Modified 36- | [mAs][mU][mA][mU][mG][mA][mC][fA][fA][fU][fU] | 974 |
| 0194 | mer | [mG][mA][mA][mU][mG][mC][mA][mA][mA][mG][mC] | |
| | | [mA][mG][mC][mC][mG][ademA-GalNAc][ademA- | |
| | | GalNAc][ademA- | |
| | | GalNAc][mG][mG][mC][mU][mG][mC] | |
| CD274- | Modified 36- | [mUs][mG][mA][mC][mA][mA][mU][fU][fG][fA][fA] | 975 |
| 0197 | mer | [mU][mG][mC][mA][mA][mA][mU][mU][mA][mG][mC] | |
| | | [mA][mG][mC][mC][mG][ademA-GalNAc][ademA- | |
| | | GalNAc][ademA- | |
| | | GalNAc][mG][mG][mC][mU][mG][mC] | |
| CD274- | Modified 36- | [mAs][mA][mU][mU][mG][mA][mA][fU][fG][fC][fA] | 976 |
| 0200 | mer | [mA][mA][mU][mU][mC][mC][mC][mA][mA][mG][mC] | |
| | | [mA][mG][mC][mC][mG][ademA-GalNAc][ademA- | |
| | | GalNAc][ademA- | |
| | | GalNAc][mG][mG][mC][mU][mG][mC] | |
| CD274- | Modified 36- | [mCs][mC][mC][mA][mG][mU][mA][fG][fA][fA][fA] | 977 |
| 0204 | mer | [mA][mA][mC][mA][mA][mU][mU][mA][mA][mG][mC] | |
| | | [mA][mG][mC][mC][mG][ademA-GalNAc][ademA- | |
| | | GalNAc][ademA- | |
| | | GalNAc][mG][mG][mC][mU][mG][mC] | |
| CD274- | Modified 36- | [mAs][mG][mU][mA][mG][mA][mA][fA][fA][fA][fC] | 978 |
| 0219 | mer | [mA][mA][mU][mU][mA][mG][mA][mC][mA][mG][mC] | |
| | | [mA][mG][mC][mC][mG][ademA-GalNAc][ademA- | |
| | | GalNAc][ademA- | |
| | | GalNAc][mG][mG][mC][mU][mG][mC] | |
| CD274- | Modified 36- | [mAs][mG][mA][mA][mA][mA][mA][fC][fA][fA][fU] | 979 |
| 0222 | mer | [mU][mA][mG][mA][mC][mC][mU][mG][mA][mG][mC] | |
| | | [mA][mG][mC][mC][mG][ademA-GalNAc][ademA- | |
| | | GalNAc][ademA- | |
| | | GalNAc][mG][mG][mC][mU][mG][mC] | |
| CD274- | Modified 36- | [mAs][mU][mG][mG][mA][mG][mG][fA][fU][fA][fA] | 980 |
| 0225 | mer | [mG][mA][mA][mC][mA][mU][mU][mA][mA][mG][mC] | |
| | | [mA][mG][mC][mC][mG][ademA-GalNAc][ademA- | |
| | | GalNAc][ademA- | |
| | | GalNAc][mG][mG][mC][mU][mG][mC] | |
| CD274- | Modified 36- | [mUs][mG][mG][mA][mG][mG][mA][fU][fA][fA][fG] | 981 |
| 0268 | mer | [mA][mA][mC][mA][mU[mU][mA][mU][mA][mG][mC] | |
| | | [mA][mG][mC][mC][mG][ademA-GalNAc][ademA- | |
| | | GalNAc][ademA- | |
| | | GalNAc][mG][mG][mC][mU][mG][mC] | |
| CD274- | Modified 36- | [mGs][mA][mG][mG][mA][mU][mA][fA][fG][fA][fA] | 982 |
| 0269 | mer | [mC][mA][mU][mU][mA][mU][mU][mC][mA][mG][mC] | |
| | | [mA][mG][mC][mC][mG][ademA-GalNAc][ademA- | |
| | | GalNAc][ademA- | |
| | | GalNAc][mG][mG][mC][mU][mG][mC] | |
| CD274- | Modified 36- | [mAs][mG][mC][mA][mA][mU][mA][fU][fG][fA][fC] | 983 |
| 0271 | mer | [mA][mA][mU][mU][mG][mA][mA][mU][mA][mG][mC] | |
| | | [mA][mG][mC][mC][mG][ademA-GalNAc][ademA- | |
| | | GalNAc][ademA- | |
| | | GalNAc][mG][mG][mC][mU][mG][mC] | |
| CD274- | Modified 36- | [mGs][mA][mU][mA][mA][mG][mA][fA][fC][fA][fU] | 984 |
| 0274 | mer | [mU][mA][mU][mU][mC][mA][mA][mU][mA][mG][mC] | |
| | | [mA][mG][mC][mC][mG][ademA-GalNAc][ademA- | |
| | | GalNAc][ademA- | |
| | | GalNAc][mG][mG][mC][mU][mG][mC] | |
| CD274- | Modified 36- | [mAs][mU][mA][mA][mG][mA][mA][fC][fA][fU][fU] | 985 |
| 0275 | mer | [mA][mU][mU][mC][mA][mA][mU][mU][mA][mG][mC] | |
| | | [mA][mG][mC][mC][mG][ademA-GalNAc][ademA- | |
| | | GalNAc][ademA- | |
| | | GalNAc][mG][mG][mC][mU][mG][mC] | |
| CD274- | Modified 36- | [mAs][mA][mG][mA][mA][mC][mA][fU][fU][fA][fU] | 986 |
| 0277 | mer | [mU][mC][mA][mA][mU][mU][mU][mG][mA][mG][mC] | |
| | | [mA][mG][mC][mC][mG][ademA-GalNAc][ademA- | |
| | | GalNAc][ademA- | |
| | | GalNAc][mG][mG][mC][mU][mG][mC] | |
| CD274- | Modified 36- | [mCs][mA][mU][mU][mA][mU][mU][fC][fA][fA][fU] | 987 |
| 0282 | mer | [mU][mU][mG][mU][mG][mC][mA][mU][mA][mG][mC] | |
| | | [mA][mG][mC][mC][mG][ademA-GalNAc][ademA- | |
| | | GalNAc][ademA- | |
| | | GalNAc][mG][mG][mC][mU][mG][mC] | |
| CD274- | Modified 36- | [mAs][mU][mU][mA][mU][mU][mC][fA][fA][fU][fU] | 988 |
| 0283 | mer | [mU][mG][mU][mG][mC][mA][mU][mG][mA][mG][mC] | |
| | | [mA][mG][mC][mC][mG][ademA-GalNAc][ademA- | |
| | | GalNAc][ademA- | |
| | | GalNAc][mG][mG][mC][mU][mG][mC] | |
| CD274- | Modified 36- | [mAs][mU][mC][mA][mC][mA][mG][fA][fU][fG][fU] | 989 |
| 0394 | mer | [mG][mA][mA][mA][mU][mU][mG][mC][mA][mG][mC] | |
| | | [mA][mG][mC][mC][mG][ademA-GalNAc][ademA- | |
| | | GalNAc][ademA- | |
| | | GalNAc][mG][mG][mC][mU][mG][mC] | |
| CD274- | Modified 36- | [mAs][mG][mA][mU][mG][mU][mG][fA][fA][fA][fU] | 990 |
| 0399 | mer | [mU][mG][mC][mA][mG][mG][mA][mU][mA][mG][mC] | |
| | | [mA][mG][mC][mC][mG][ademA-GalNAc][ademA- | |
| | | GalNAc][ademA- | |
| | | GalNAc][mG][mG][mC][mU][mG][mC] | |
| CD274- | Modified 36- | [mCs][mA][mG][mU][mC][mA][mC][fC][fU][fC][fU] | 991 |
| 0530 | mer | [mG][mA][mA][mC][mA][mU][mG][mA][mA][mG][mC] | |
| | | [mA][mG][mC][mC][mG][ademA-GalNAc][ademA- | |
| | | GalNAc][ademA- | |
| | | GalNAc][mG][mG][mC][mU][mG][mC] | |
| CD274- | Modified 36- | [mAs][mG][mU][mC][mA][mC][mC][fU][fC][fU][fG] | 992 |
| 0531 | mer | [mA][mA][mC][mA][mU][mG][mA][mA][mA][mG][mC] | |
| | | [mA][mG][mC][mC][mG][ademA-GalNAc][ademA- | |
| | | GalNAc][ademA- | |
| | | GalNAc][mG][mG][mC][mU][mG][mC] | |
| CD274- | Modified 36- | [mAs][mG][mG][mA][mG][mA][mA][fG][fC][fU][fU] | 993 |
| 0653 | mer | [mU][mU][mC][mA][mA][mU][mG][mU][mA][mG][mC] | |
| | | [mA][mG][mC][mC][mG][ademA-GalNAc][ademA- | |
| | | GalNAc][ademA- | |
| | | GalNAc][mG][mG][mC][mU][mG][mC] | |
| CD274- | Modified 36- | [mAs][mC][mC][mA][mG][mC][mA][fC][fA][fC][fU] | 994 |
| 0673 | mer | [mG][mA][mG][mA][mA][mU][mC][mA][mA][mG][mC] | |
| | | [mA][mG][mC][mC][mG][ademA-GalNAc][ademA- | |
| | | GalNAc][ademA- | |
| | | GalNAc][mG][mG][mC][mU][mG][mC] | |
| CD274- | Modified 36- | [mCs][mA][mC][mA][mA][mC][mA][fA][fC][fU][fA] | 995 |
| 0693 | mer | [mA][mU][mG][mA][mG][mA][mU][mU][mA][mG][mC] | |
| | | [mA][mG][mC][mC][mG][ademA-GalNAc][ademA- | |
| | | GalNAc][ademA- | |
| | | GalNAc][mG][mG][mC][mU][mG][mC] | |
| CD274- | Modified 36- | [mAs][mC][mA][mA][mC][mU][mA][fA][fU][fG][fA] | 996 |
| 0697 | mer | [mG][mA][mU][mU][mU][mU][mC][mU][mA][mG][mC] | |
| | | [mA][mG][mC][mC][mG][ademA-GalNAc][ademA- | |
| | | GalNAc][ademA- | |
| | | GalNAc][mG][mG][mC][mU][mG][mC] | |
| CD274- | Modified 36- | [mAs][mC][mU][mA][mA][mU][mG][fA][fG][fA][fU] | 997 |
| 0700 | mer | [mU][mU][mU][mC][mU][mA][mC][mU][mA][mG][mC] | |
| | | [mA][mG][mC][mC][mG][ademA-GalNAc][ademA- | |
| | | GalNAc][ademA- | |
| | | GalNAc][mG][mG][mC][mU][mG][mC] | |
| CD274- | Modified 36- | [mCs][mU][mA][mA][mU][mG][mA][fG][fA][fU][fU] | 998 |
| 0701 | mer | [mU][mU][mC][mU][mA][mC][mU][mG][mA][mG][mC] | |
| | | [mA][mG][mC][mC][mG][ademA-GalNAc][ademA- | |
| | | GalNAc][ademA- | |
| | | GalNAc][mG][mG][mC][mU][mG][mC] | |
| CD274- | Modified 36- | [mAs][mG][mG][mA][mA][mA][mA][fC][fC][fA][fU] | 999 |
| 0743 | mer | [mA][mC][mA][mG][mC][mU][mG][mA][mA][mG][mC] | |
| | | [mA][mG][mC][mC][mG][ademA-GalNAc][ademA- | |
| | | GalNAc][ademA- | |
| | | GalNAc][mG][mG][mC][mU][mG][mC] | |
| CD274- | Modified 36- | [mAs][mA][mA][mA][mC][mC][mA][fU][fA][fC][fA] | 1000 |
| 0746 | mer | [mG][mC][mU][mG][mA][mA][mU][mU][mA][mG][mC] | |
| | | [mA][mG][mC][mC][mG][ademA-GalNAc][ademA- | |
| | | GalNAc][ademA- | |
| | | GalNAc][mG][mG][mC][mU][mG][mC] | |
| CD274- | Modified 22- | [MePhosphonate-4O- | 1001 |
| 0088 | mer | mUs][fCs][fAs][fA][fA][mU][fA][mU][mC][fC][mU] | |
| | | [mC][mA][fU][mC][mU][mU][mU][mC][mUs][mGs][mG] | |
| CD274- | Modified 22- | [MePhosphonate-4O- | 1002 |
| 0094 | mer | mUs][fAs][fGs][fA][fC][mA][fG][mC][mA][fA][mA] | |
| | | [mU][mA][fU][mC][mC][mU][mC][mA][mUs][mGs][mG] | |
| CD274- | Modified 22- | [MePhosphonate-4O- | 1004 |
| 0097 | mer | mUs][fUs][fAs][fA][fA][mG][fA][mC][mA][fG][mC] | |
| | | [mA][mA][fA][mU][mA][mU][mC][mC][mUs][mGs][mG] | |
| CD274- | Modified 22- | [MePhosphonate-4O- | 1005 |
| 0098 | mer | mUs][fAs][fUs][fA][fA][mA][fG][mA][mC][fA][mG] | |
| | | [mC][mA][fA][mA][mU][mA][mU][mC][mCs][mGs][mG] | |
| CD274- | Modified 22- | [MePhosphonate-4O- | 1006 |
| 0100 | mer | mUs][fAs][fUs][fA][fU][mA][fA][mA][mG][fA][mC] | |
| | | [mA][mG][fC][mA][mA][mA][mU][mA][mUs][mGs][mG] | |
| CD274- | Modified 22- | [MePhosphonate-4O- | 1007 |
| 0102 | mer | mUs][fGs][fAs][fA][fU][mA][fU][mA][mA][fA][mG] | |
| | | [mA][mC][fA][mG][mC][mA][mA][mA][mUs][mGs][mG] | |
| CD274- | Modified 22- | [MePhosphonate-4O- | 1008 |
| 0167 | mer | mUs][fUs][fCs][fU][fA][mC][fC][mA][mC][fA][mU] | |
| | | [mA][mU][fA][mG][mG][mU][mC][mC][mUs][mGs][mG] | |
| CD274- | Modified 22- | [MePhosphonate-4O- | 1009 |
| 0193 | mer | mUs][fCs][fAs][fU][fU][mC][fA][mA][mU][fU][mG] | |
| | | [mU][mC][fA][mU][mA][mU][mU][mG][mCs][mGs][mG] | |
| CD274- | Modified 22- | [MePhosphonate-4O- | 1010 |
| 0194 | mer | mUs][fUs][fUs][fG][fC][mA][fU][mU][mC][fA][mA] | |
| | | [mU][mU][fG][mU][mC][mA][mU][mA][mUs][mGs][mG] | |
| CD274- | Modified 22- | [MePhosphonate-4O- | 1011 |
| 0197 | mer | mUs][fAs][fAs][fU][fU][mU][fG][mC][mA][fU][mU] | |
| | | [mC][mA][fA][mU][mU][mG][mU][mC][mAs][mGs][mG] | |
| CD274- | Modified 22- | [MePhosphonate-4O- | 1012 |
| 0200 | mer | mUs][fUs][fGs][fG][fG][mA][fA][mU][mU][fU][mG] | |
| | | [mC][mA][fU][mU][mC][mA][mA][mU][mUs][mGs][mG] | |
| CD274- | Modified 22- | [MePhosphonate-4O- | 1013 |
| 0204 | mer | mUs][fUs][fAs][fA][fU][mU][fG][mU][mU][fU][mU] | |
| | | [mU][mC][fU][mA][mC][mU][mG][mG][mGs][mGs][mG] | |
| CD274- | Modified 22- | [MePhosphonate-4O- | 1014 |
| 0219 | mer | mUs][fGs][fUs][fC][fU][mA][fA][mU][mU][fG][mU] | |
| | | U[m][mU][fU][mU][mC][mU][mA][mC][mUs][mGs][mG] | |
| CD274- | Modified 22- | [MePhosphonate-4O- | 1015 |
| 0222 | mer | mUs][fCs][fAs][fG][fG][mU][fC][mU][mA][fA][mU] | |
| | | [mU][mG][fU][mU][mU][mU][mU][mC][mUs][mGs][mG] | |
| CD274- | Modified 22- | [MePhosphonate-4O- | 1016 |
| 0225 | mer | mUs][fUs][fAs][fA][fU][mG][fU][mU][mC][fU][mU] | |
| | | A[m][mU][fC][mC][mU][mC][mC][mA][mUs][mGs][mG] | |
| CD274- | Modified 22- | [MePhosphonate-4O- | 1017 |
| 0268 | mer | mUs][fAs][fUs][fA][fA][mU][fG][mU][mU][fC][mU] | |
| | | [mU][mA][fU][mC][mC][mU][mC][mC][mAs][mGs][mG] | |
| CD274- | Modified 22- | [MePhosphonate-4O- | 1018 |
| 0269 | mer | mUs][fGs][fAs][fA][fU][mA][fA][mU][mG][fU][mU] | |
| | [m | C][mU][fU][mA][mU][mC][mC][mU][mCs][mGs][mG] | |
| CD274- | Modified 22- | [MePhosphonate-4O- | 1019 |
| 0271 | mer | mUs][fAs][fU][fU][fC][mA][fA][mU][mU][fG][mU] | |
| | | [mC][mA][fU][mA][mU][mU][mG][mC][mUs][mGs][mG] | |
| CD274- | Modified 22- | [MePhosphonate-4O- | 1020 |
| 0274 | mer | mUs][fAs][fUs][fU][fG][mA][fA][mU][mA][fA][mU] | |
| | | [mG][mU][fU][mC][mU][mU][mA][mU][mCs][mGs][mG] | |
| CD274- | Modified 22- | [MePhosphonate-4O- | 1021 |
| 0275 | mer | mUs][fAs][fAs][fU][fU][mG][fA][mA][mU][fA][mA] | |
| | | [mU][mG][fU][mU][mC][mU][mU][mA][mUs][mGs][mG] | |
| CD274- | Modified 22- | [MePhosphonate-4O- | 1022 |
| 0277 | mer | mUs][fCs][fAs][fA][fA][mU][fU][mG][mA][fA][mU] | |
| | | [mA][mA][fU][mG][mU][mU][mC][mU][mUs][mGs][mG] | |
| CD274- | Modified 22- | [MePhosphonate-4O- | 1023 |
| 0282 | mer | mUs][fAs][fUs][fG][fC][mA][fC][mA][mA][fA][mU] | |
| | | [mU][mG][fA][mA][mU][mA][mA][mU][mGs][mGs][mG] | |
| CD274- | Modified 22- | [MePhosphonate-4O- | 1024 |
| 0283 | mer | mUs][fCs][fAs][fU][fG][mC][fA][mC][mA][fA][mA] | |
| | | [mU][mU][fG][mA][mA][mU][mA][mA][mUs][mGs][mG] | |
| CD274- | Modified 22- | [MePhosphonate-4O- | 1025 |
| 0394 | mer | mUs][fGs][fCs][fA][fA][mU][fU][mU][mC][fA][mC] | |
| | | [mA][mU][fC][mU][mG][mU][mG][mA][mUs][mGs][mG] | |
| CD274- | Modified 22- | [MePhosphonate-4O- | 1026 |
| 0399 | mer | mUs][fAs][fUs][fC][fC][mU][fG][mC][mA][fA][mU] | |
| | | [mU][mU][fC][mA][mC][mA][mU][mC][mUs][mGs][mG] | |
| CD274- | Modified 22- | [MePhosphonate-4O- | 1027 |
| 0530 | mer | mUs][fUs][fCs][fA][fU][mG][fU][mU][mC][fA][mG] | |
| | | [mA][mG][fG][mU][mG][mA][mC][mU][mGs][mGs][mG] | |
| CD274- | Modified 22- | [MePhosphonate-4O- | 1028 |
| 0531 | mer | mUs][fUs][fUs][fC][fA][mU][fG][mU][mU][fC][mA] | |
| | | [mG][mA][fG][mG][mU][mG][mA][mC][mUs][mGs][mG] | |
| CD274- | Modified 22- | [MePhosphonate-4O- | 1029 |
| 0653 | mer | mUs][fAs][fCs][fA][fU][mU][fG][mA][mA][fA][mA] | |
| | | [mG][mC][fU][mU][mC][mU][mC][mC][mUs][mGs][mG] | |
| CD274- | Modified 22- | [MePhosphonate-4O- | 1030 |
| 0673 | mer | mUs][fUs][fGs][fA][fU][mU][fC][mU][mC][fA][mG] | |
| | | [mU][mG][fU][mG][mC][mU][mG][mG][mUs][mGs][mG] | |
| CD274- | Modified 22- | [MePhosphonate-4O- | 1031 |
| 0693 | mer | mUs][fAs][fAs][fU][fC][mU][fC][mA][mU][fU][mA] | |
| | | [mG][mU][fU][mG][mU][mU][mG][mU][mGs][mGs][mG] | |
| CD274- | Modified 22- | [MePhosphonate-4O- | 1032 |
| 0697 | mer | mUs][fAs][fGs][fA][fA][mA][fA][mU][mC][fU][mC] | |
| | | [mA][mU][fU][mA][mG][mU][mU][mG][mUs][mGs][mG] | |
| CD274- | Modified 22- | [MePhosphonate-4O- | 1033 |
| 0700 | mer | mUs][fAs][fGs][fU][fA][mG][fA][mA][mA][fA][mU] | |
| | | [mC][mU][fC][mA][mU][mU][mA][mG][mUs][mGs][mG] | |
| CD274- | Modified 22- | [MePhosphonate-4O- | 1034 |
| 0701 | mer | mUs][fCs][fAs][fG][fU][mA][fG][mA][mA][fA][mA] | |
| | | [mU][mC][fU][mC][mA][mU][mU][mA][mGs][mGs][mG] | |
| CD274- | Modified 22- | [MePhosphonate-4O- | 1035 |
| 0743 | mer | mUs][fUs][fCs][fA][fG][mC][fU][mG][mU][fA][mU] | |
| | | [mG][mG][fU][mU][mU][mU][mC][mC][mUs][mGs][mG] | |
| CD274- | Modified 22- | [MePhosphonate-4O- | 1036 |
| 0746 | mer | mUs][fAs][fAs][fU][fU][mC][fA][mG][mC][fU][mG] | |
| | | [mU][mA][fU][mG][mG][mU][mU][mU][mUs][mGs][mG] | |
| Human | RefSeq | AGTTCTGCGCAGCTTCCCGAGGCTCCGCACCAGC | 1037 |
| CD274 | NM_014143.4 | CGCGCTTCTGTCCGCCTGCAGGGCATTCCAGAAA | |
| mRNA | | GATGAGGATATTTGCTGTCTTTATATTCATGACCT | |
| | | ACTGGCATTTGCTGAACGCATTTACTGTCACGGT | |
| | | TCCCAAGGACCTATATGTGGTAGAGTATGGTAGC | |
| | | AATATGACAATTGAATGCAAATTCCCAGTAGAAA | |
| | | AACAATTAGACCTGGCTGCACTAATTGTCTATTG | |
| | | GGAAATGGAGGATAAGAACATTATTCAATTTGTG | |
| | | CATGGAGAGGAAGACCTGAAGGTTCAGCATAGT | |
| | | AGCTACAGACAGAGGGCCCGGCTGTTGAAGGAC | |
| | | CAGCTCTCCCTGGGAAATGCTGCACTTCAGATCA | |
| | | CAGATGTGAAATTGCAGGATGCAGGGGTGTACC | |
| | | GCTGCATGATCAGCTATGGTGGTGCCGACTACAA | |
| | | GCGAATTACTGTGAAAGTCAATGCCCCATACAAC | |
| | | AAAATCAACCAAAGAATTTTGGTTGTGGATCCAG | |
| | | TCACCTCTGAACATGAACTGACATGTCAGGCTGA | |
| | | GGGCTACCCCAAGGCCGAAGTCATCTGGACAAG | |
| | | CAGTGACCATCAAGTCCTGAGTGGTAAGACCACC | |
| | | ACCACCAATTCCAAGAGAGAGGAGAAGCTTTTCA | |
| | | ATGTGACCAGCACACTGAGAATCAACACAACAA | |
| | | CTAATGAGATTTTCTACTGCACTTTTAGGAGATTA | |
| | | GATCCTGAGGAAAACCATACAGCTGAATTGGTCA | |
| | | TCCCAGAACTACCTCTGGCACATCCTCCAAATGA | |
| | | AAGGACTCACTTGGTAATTCTGGGAGCCATCTTA | |
| | | TTATGCCTTGGTGTAGCACTGACATTCATCTTCCG | |
| | | TTTAAGAAAAGGGAGAATGATGGATGTGAAAAA | |
| | | ATGTGGCATCCAAGATACAAACTCAAAGAAGCA | |
| | | AAGTGATACACATTTGGAGGAGACGTAATCCAGC | |
| | | ATTGGAACTTCTGATCTTCAAGCAGGGATTCTCA | |
| | | ACCTGTGGTTTAGGGGTTCATCGGGGCTGAGCGT | |
| | | GACAAGAGGAAGGAATGGGCCCGTGGGATGCAG | |
| | | GCAATGTGGGACTTAAAAGGCCCAAGCACTGAA | |
| | | AATGGAACCTGGCGAAAGCAGAGGAGGAGAATG | |
| | | AAGAAAGATGGAGTCAAACAGGGAGCCTGGAGG | |
| | | GAGACCTTGATACTTTCAAATGCCTGAGGGGCTC | |
| | | ATCGACGCCTGTGACAGGGAGAAAGGATACTTCT | |
| | | GAACAAGGAGCCTCCAAGCAAATCATCCATTGCT | |
| | | CATCCTAGGAAGACGGGTTGAGAATCCCTAATTT | |
| | | GAGGGTCAGTTCCTGCAGAAGTGCCCTTTGCCTC | |
| | | CACTCAATGCCTCAATTTGTTTTCTGCATGACTGA | |
| | | GAGTCTCAGTGTTGGAACGGGACAGTATTTATGT | |
| | | ATGAGTTTTTCCTATTTATTTTGAGTCTGTGAGGT | |
| | | CTTCTTGTCATGTGAGTGTGGTTGTGAATGATTTC | |
| | | TTTTGAAGATATATTGTAGTAGATGTTACAATTTT | |
| | | GTCGCCAAACTAAACTTGCTGCTTAATGATTTGC | |
| | | TCACATCTAGTAAAACATGGAGTATTTGTAAGGT | |
| | | GCTTGGTCTCCTCTATAACTACAAGTATACATTG | |
| | | GAAGCATAAAGATCAAACCGTTGGTTGCATAGG | |
| | | ATGTCACCTTTATTTAACCCATTAATACTCTGGTT | |
| | | GACCTAATCTTATTCTCAGACCTCAAGTGTCTGTG | |
| | | CAGTATCTGTTCCATTTAAATATCAGCTTTACAAT | |
| | | TATGTGGTAGCCTACACACATAATCTCATTTCATC | |
| | | GCTGTAACCACCCTGTTGTGATAACCACTATTATT | |
| | | TTACCCATCGTACAGCTGAGGAAGCAAACAGATT | |
| | | AAGTAACTTGCCCAAACCAGTAAATAGCAGACCT | |
| | | CAGACTGCCACCCACTGTCCTTTTATAATACAATT | |
| | | TACAGCTATATTTTACTTTAAGCAATTCTTTTATT | |
| | | CAAAAACCATTTATTAAGTGCCCTTGCAATATCA | |
| | | ATCGCTGTGCCAGGCATTGAATCTACAGATGTGA | |
| | | GCAAGACAAAGTACCTGTCCTCAAGGAGCTCATA | |
| | | GTATAATGAGGAGATTAACAAGAAAATGTATTAT | |
| | | TACAATTTAGTCCAGTGTCATAGCATAAGGATGA | |
| | | TGCGAGGGGAAAACCCGAGCAGTGTTGCCAAGA | |
| | | GGAGGAAATAGGCCAATGTGGTCTGGGACGGTT | |
| | | GGATATACTTAAACATCTTAATAATCAGAGTAAT | |
| | | TTTCATTTACAAAGAGAGGTCGGTACTTAAAATA | |
| | | ACCCTGAAAAATAACACTGGAATTCCTTTTCTAG | |
| | | CATTATATTTATTCCTGATTTGCCTTTGCCATATA | |
| | | ATCTAATGCTTGTTTATATAGTGTCTGGTATTGTT | |
| | | TAACAGTTCTGTCTTTTCTATTTAAATGCCACTAA | |
| | | ATTTTAAATTCATACCTTTCCATGATTCAAAATTC | |
| | | AAAAGATCCCATGGGAGATGGTTGGAAAATCTCC | |
| | | ACTTCATCCTCCAAGCCATTCAAGTTTCCTTTCCA | |
| | | GAAGCAACTGCTACTGCCTTTCATTCATATGTTCT | |
| | | TCTAAAGATAGTCTACATTTGGAAATGTATGTTA | |
| | | AAAGCACGTATTTTTAAAATTTTTTTCCTAAATAG | |
| | | TAACACATTGTATGTCTGCTGTGTACTTTGCTATT | |
| | | TTTATTTATTTTAGTGTTTCTTATATAGCAGATGG | |
| | | AATGAATTTGAAGTTCCCAGGGCTGAGGATCCAT | |
| | | GCCTTCTTTGTTTCTAAGTTATCTTTCCCATAGCT | |
| | | TTTCATTATCTTTCATATGATCCAGTATATGTTAA | |
| | | ATATGTCCTACATATACATTTAGACAACCACCAT | |
| | | TTGTTAAGTATTTGCTCTAGGACAGAGTTTGGATT | |
| | | TGTTTATGTTTGCTCAAAAGGAGACCCATGGGCT | |
| | | CTCCAGGGTGCACTGAGTCAATCTAGTCCTAAAA | |
| | | AGCAATCTTATTATTAACTCTGTATGACAGAATC | |
| | | ATGTCTGGAACTTTTGTTTTCTGCTTTCTGTCAAG | |
| | | TATAAACTTCACTTTGATGCTGTACTTGCAAAATC | |
| | | ACATTTTCTTTCTGGAAATTCCGGCAGTGTACCTT | |
| | | GACTGCTAGCTACCCTGTGCCAGAAAAGCCTCAT | |
| | | TCGTTGTGCTTGAACCCTTGAATGCCACCAGCTG | |
| | | TCATCACTACACAGCCCTCCTAAGAGGCTTCCTG | |
| | | GAGGTTTCGAGATTCAGATGCCCTGGGAGATCCC | |
| | | AGAGTTTCCTTTCCCTCTTGGCCATATTCTGGTGT | |
| | | CAATGACAAGGAGTACCTTGGCTTTGCCACATGT | |
| | | CAAGGCTGAAGAAACAGTGTCTCCAACAGAGCT | |
| | | CCTTGTGTTATCTGTTTGTACATGTGCATTTGTAC | |
| | | AGTAATTGGTGTGACAGTGTTCTTTGTGTGAATT | |
| | | ACAGGCAAGAATTGTGGCTGAGCAAGGCACATA | |
| | | GTCTACTCAGTCTATTCCTAAGTCCTAACTCCTCC | |
| | | TTGTGGTGTTGGATTTGTAAGGCACTTTATCCCTT | |
| | | TTGTCTCATGTTTCATCGTAAATGGCATAGGCAG | |
| | | AGATGATACCTAATTCTGCATTTGATTGTCACTTT | |
| | | TTGTACCTGCATTAATTTAATAAAATATTCTTATT | |
| | | TATTTTGTTACTTGGTACACCAGCATGTCCATTTT | |
| | | CTTGTTTATTTTGTGTTTAATAAAATGTTCAGTTT | |
| | | AACATCCCA | |
| Cyno- | XM_ | CACACACACGCACACACCCCTACTTTCTAGAATA | 1038 |
| molgus | 005581779.2 | AAAACCAAAGCCATATGGGTCTGCTGTTGACTTT | |
| Monkey | | CTATATGTCGTAGAGTTATATCAAGTTAGGTCAA | |
| CD274 | | GATGTTCAGTCACCTTGAAGACGCTTTTATCAGA | |
| mRNA | | AAGGGGGAAACCTTTCTGATAAAGGTTAAGGGG | |
| | | TAACCTTAAGCTGTCACCCCTCTGAAGGTAAAAT | |
| | | CAAGGTGCGTTCAGATGTTGGCTTGTTGTAAATT | |
| | | TCTGTTTATATTAATAACATACCAAATGTGGATTT | |
| | | GTTTTAATCTTCGGAACTCTTTCCGGTGAAAACCT | |
| | | CATTTACAAGAAAACTGGACTGACAGGTTTCACT | |
| | | TTCTGTTTCATTTCTATACATAGCTTTATTCCTAG | |
| | | GACACCAACACCACTCGCTACCCAAACTGAAAGC | |
| | | TTCCCCGATTCCGCCGAAGGTCAGGAAAGTCCAA | |
| | | TGCCGGGCAAACTGGATTTGCTGCCTTGCGCAGA | |
| | | GGTGGGCGGGACCCCGCCTCCGGGCCGGGCGCC | |
| | | AAGTTGAGCAGCTGGCACGCCTCGCGAAGCCCCA | |
| | | GTCCTGAAGCCCCAGTCCTGCGCTGCTTCCCGAG | |
| | | GCTCCGCACCAGCCGCGCTTCTCTCTGCCTGCAG | |
| | | CACATTCCAGAAAGATGAGGATATTTGCTGTCTT | |
| | | TATATTCACGATCTACTGGCATTTGCTGAATGCAT | |
| | | TTACTGTCACGGTTCCCAAGGACCTATATGTGGT | |
| | | AGAGTATGGCAGCAATATGACAATTGAATGCAA | |
| | | ATTCCCAGTAGAAAAACAATTAGACCTGACTTCA | |
| | | CTAATTGTCTATTGGGAAATGGAGGATAAGAACA | |
| | | TTATTCAATTTGTGCATGGAGAGGAAGACCTGAA | |
| | | GGTTCAGCATAGTAACTACAGACAGAGGGCCCA | |
| | | GCTGTTGAAGGACCAGCTCTCCCTGGGAAATGCT | |
| | | GCACTTCGGATCACAGATGTGAAATTGCAGGATG | |
| | | CAGGGGTTTACCGCTGCATGATCAGCTATGGTGG | |
| | | TGCCGACTACAAGCGGATTACCGTGAAAGTCAAT | |
| | | GCTCCATACAACAAAATCAACCAAAGAATTTTGG | |
| | | TTGTCGATCCAGTCACCTCTGAACATGAACTAAC | |
| | | ATGTCAGGCTGAGGGCTACCCCAAGGCCGAAGTC | |
| | | ATTTGGACAAGCAGTGACCATCAAGTCCTGAGTG | |
| | | GTAAGACCACCACCACCAATTCCAAGAGAGAGG | |
| | | AGAAGCTTTTAAATGTGACCAGCACACTGAGAAT | |
| | | CAACACAACAGCTAATGAGATTTTCTACTGCATT | |
| | | TTTAGGAGATTAGATCCTGAGGAAAACCATACAG | |
| | | CTGAATTGGTCATCCCAGAACTACCTCTGGCGCT | |
| | | TCCTCCAAATGAAAGGACTCACTTGGTAATTCTG | |
| | | GGAGCCATCTTTTTACTCCTTGGTGTAGCACTGAC | |
| | | ATTCATCTTCTATTTAAGAAAAGGGAGAATGATG | |
| | | GATATGAAAAAATGTGGCATTCGAGTTACAAACT | |
| | | CAAAGAAGCAACGTGATACACAATTGGAGGAGA | |
| | | CGTAATCCAGCATTGGAACTTCTGATCTTCAAGC | |
| | | AGGGATTCTCAGCCTGTGGTTTGGGGGTTCGTCA | |
| | | GGGCTGAGCATGACCAGAGGAATGAATGGGCCC | |
| | | GTGGGATGCATGCAGTATGGGACTTAAAAGGCCC | |
| | | AAGCACTGAAAATGGAACCTGGCGAAAGCAGAG | |
| | | GAGGAGAATGAAGAAAAATGGAGTTGAACAGGG | |
| | | AGCGTGGAGGGAGACCTTGATACTTTCAAATGCC | |
| | | TGAGGGGCTCATCGGTGCATGTGACAGGGAGAA | |
| | | AGGATACTTCTGAACAAGGAGCCTCCAAGCAAAT | |
| | | CATCCACTGCTCATCTTAGGAAAACGGGTTGAGA | |
| | | ATCCCTAATTTGAGGGTCAGTTCCTGCAGAAGTG | |
| | | CCCTTTGCCTCCACTCAATGCCTCAATTTGTTTTC | |
| | | TGCGTGACTGAGGGTCCCAGTGTTGGAACAGTAT | |
| | | TTATGTATGAGATTTTCCTATTTATTTTGAGTCTG | |
| | | TGAGGTCTTCTTGTCATGGGAGTGTGGTTGTGAA | |
| | | TGATTTCTTTTGAAGATATATTGTAGTAGATGTTA | |
| | | CAATTTTGTCGCCAAACTAAACTTGATGCTTAAT | |
| | | GACTTGCTCACATCTAGTAAAACATGGAGTATTT | |
| | | GTAAGGTGCTTGGTCTCCTCTATAACTACAAGTA | |
| | | CACATTGGAAGCATAAAGATCAAACCGTTGATTT | |
| | | GTATAGGATGTCACCTTTATTTAACCCATTAATAC | |
| | | TCTGATTGACTTAATCTTATTCTCAGACCTCAAGT | |
| | | GTCTGTGCAGTATCTGTTCCATTTAAATATCAGCT | |
| | | TTATAATTATGTGGTACCATACACACATAATCTC | |
| | | CTTTCATCGCTGTAACCACCCTGTTGTGATGACCA | |
| | | CTATTATTTTACCCATTGTACAGCTGAGGAAGCA | |
| | | AACAGATTAAGTAACTTGCCAAAACCAGTAAATA | |
| | | GCAGAGCTCAGACTGCCACCCACTGTCCTTTTAT | |
| | | AATACAATTTACAGCTATATTTTACTTTAAGCAAT | |
| | | TCATTTATTCAAAACCCATTTATTAAGTGCCCTTG | |
| | | CAATATCAATCACTGTACCAGGCATTGAATCTAC | |
| | | AGATGTGAGCAAGAGAAAGTACCTGTCCTCAAG | |
| | | GAGCTTGGAGTATAATAAGGAGATTAATAAGAA | |
| | | AATATATTATTACAATCTAGTCCAGTGTCATAGC | |
| | | ATAAGGATGATGTGAGGAGAAAAGCTGAGCAGT | |
| | | GTTGCCAAGAGGAGGAAATAGGCCAATGTGGTC | |
| | | TGGGACAGTTGAATGTATTTAAACATCTTAATAA | |
| | | TCAAAGTAATTTTCATTTACAAAGAGAAGTCAGT | |
| | | ACTTAAAATAACCCTGAAAAATAACACTGGAATT | |
| | | CCTTTTCTAGCATTATATTTATCCCTGATTTGCCT | |
| | | TTGCCATACAATCTAATGCTTGTTTATATAGTGTC | |
| | | TGATATTGTTTAACAGTTCTGTCTTTTCTATTCAA | |
| | | ATGCTATTAAATTTTAAATTCATACCTTTCCATGA | |
| | | TTCAAAATTCAAAAGATCCCATGGGAGATGGTTT | |
| | | GAAAATCTCCACTTCATCCTCCAAGCCATTCAAG | |
| | | TTTCCTTTCCAGAAGCAACTGCTACTGCCTTTTAT | |
| | | TCATATGTTCTTCTAAAGATAGTCTACATTTGGAA | |
| | | ATGTATGTTAAAAGCATATATTTTTAAATTTTTTT | |
| | | CCCTAAATAGTAACACATTATATGTCTGCTGTGC | |
| | | ACTTTGCTATTTTTATTTATTGTAGTGTTTCTTATG | |
| | | TAGCAGATGGAATGAATTTGAAGCTCCCAAGGGT | |
| | | CAGGACACATGCCTTCTTTGTTTCTAAGTTATCTT | |
| | | TCCCATAGCTTTTCATAATCTTTCATATGATTTAG | |
| | | TACATGTTAAATATGTGCTACATATACATTTAGA | |
| | | CAACCAGCATTTGTTAAGTATTTGCTCTAGGACT | |
| | | GAGTTTGGATTTATGTTTGCTCAAAAGGAGACCC | |
| | | ATGGGCTCTCCAGGGTGCACTGAGTCAATCTAGT | |
| | | CCTAAAAAGCAATCTTATTATTAACTCTGTATGA | |
| | | CAGAATCATATCTGGAACTTTTGTTTTCTGCTTTC | |
| | | TGTCAAGTATAAACTTCACTTTGATGCTGTACTTG | |
| | | CAAAATCACATTTTCTTTCTGGAAATTCCAGTAGT | |
| | | GTACCTTGACTGCTAGTTACCCTGTGCCAGAAAA | |
| | | GCCTCATTCGTTGTGCTTGAACCCTTTAATGCCAC | |
| | | CAGCTGTCATCACTACACAGGCCTCCTAAGAGGC | |
| | | TTCCTGGAGGTTTTGAGATTCAGATGCCCTGAGA | |
| | | GATCCCAGAGTTTCCTTTCCCTCTTGGCCACATTC | |
| | | TGGTGTCAGTGACAAGGAATACCTTCGCTTTGCC | |
| | | ACCCGTCAAGGTTGAAGAAACAGCGTCTCCAACA | |
| | | GAGCTCCTTGTGTTATCTGTTTGTACATGTGCATT | |
| | | TGTACAGTAATTTGTGTGACAGTGTTCTTTGTGTG | |
| | | AATTACAGGCAAGAACTGTGGCTGAGCAAGGCA | |
| | | CATAGTCTACTCAGTCTATTCCTAACTCCTCCTTT | |
| | | TGGTGTTGGATTTGTAAGGCACTTTATCCCTTTTG | |
| | | TCTCATGTTTCATCGTAAATGGCATAGGCAGAGA | |
| | | TGATATCTAATTCTGCATTTGATTGTCACTTTTTG | |
| | | TACCTGCATTAATTTAATAAAATATCCTTATTTAT | |
| | | TTTGTTACTTGGTACACCAGCATGTCCATTTTCTT | |
| | | GTTTATTTTGTGTTTCATAAAATGCTTAGTTTAA | |
| Mus | NM_021893.3 | GAAATCGTGGTCCCCAAGCCTCATGCCAGGCTGC | 1039 |
| Musculus | | ACTTGCACGTCGCGGGCCAGTCTCCTCGCCTGCA | |
| CD274 | | GATAGTTCCCAAAACATGAGGATATTTGCTGGCA | |
| mRNA | | TTATATTCACAGCCTGCTGTCACTTGCTACGGGC | |
| | | GTTTACTATCACGGCTCCAAAGGACTTGTACGTG | |
| | | GTGGAGTATGGCAGCAACGTCACGATGGAGTGC | |
| | | AGATTCCCTGTAGAACGGGAGCTGGACCTGCTTG | |
| | | CGTTAGTGGTGTACTGGGAAAAGGAAGATGAGC | |
| | | AAGTGATTCAGTTTGTGGCAGGAGAGGAGGACCT | |
| | | TAAGCCTCAGCACAGCAACTTCAGGGGGAGAGC | |
| | | CTCGCTGCCAAAGGACCAGCTTTTGAAGGGAAAT | |
| | | GCTGCCCTTCAGATCACAGACGTCAAGCTGCAGG | |
| | | ACGCAGGCGTTTACTGCTGCATAATCAGCTACGG | |
| | | TGGTGCGGACTACAAGCGAATCACGCTGAAAGTC | |
| | | AATGCCCCATACCGCAAAATCAACCAGAGAATTT | |
| | | CCGTGGATCCAGCCACTTCTGAGCATGAACTAAT | |
| | | ATGTCAGGCCGAGGGTTATCCAGAAGCTGAGGTA | |
| | | ATCTGGACAAACAGTGACCACCAACCCGTGAGTG | |
| | | GGAAGAGAAGTGTCACCACTTCCCGGACAGAGG | |
| | | GGATGCTTCTCAATGTGACCAGCAGTCTGAGGGT | |
| | | CAACGCCACAGCGAATGATGTTTTCTACTGTACG | |
| | | TTTTGGAGATCACAGCCAGGGCAAAACCACACA | |
| | | GCGGAGCTGATCATCCCAGAACTGCCTGCAACAC | |
| | | ATCCTCCACAGAACAGGACTCACTGGGTGCTTCT | |
| | | GGGATCCATCCTGTTGTTCCTCATTGTAGTGTCCA | |
| | | CGGTCCTCCTCTTCTTGAGAAAACAAGTGAGAAT | |
| | | GCTAGATGTGGAGAAATGTGGCGTTGAAGATAC | |
| | | AAGCTCAAAAAACCGAAATGATACACAATTCGA | |
| | | GGAGACGTAAGCAGTGTTGAACCCTCTGATCGTC | |
| | | GATTGGCAGCTTGTGGTCTGTGAAAGAAAGGGCC | |
| | | CATGGGACATGAGTCCAAAGACTCAAGATGGAA | |
| | | CCTGAGGGAGAGAACCAAGAAAGTGTTGGGAGA | |
| | | GGAGCCTGGAACAACGGACATTTTTTCCAGGGAG | |
| | | ACACTGCTAAGCAAGTTGCCCATCAGTCGTCTTG | |
| | | GGAAATGGATTGAGGGTTCCTGGCTTAGCAGCTG | |
| | | GTCCTTGCACAGTGACCTTTTCCTCTGCTCAGTGC | |
| | | CGGGATGAGAGATGGAGTCATGAGTGTTGAAGA | |
| | | ATAAGTGCCTTCTATTTATTTTGAGTCTGTGTGTT | |
| | | CTCACTTTGGGCATGTAATTATGACTGGTGAATT | |
| | | CTGACGACATGATAGATCTTAAGATGTAGTCACC | |
| | | AAACTCAACTGCTGCTTAGCATCCTCCGTAACTA | |
| | | CTGATACAAGCAGGGAACACAGAGGTCACCTGC | |
| | | TTGGTTTGACAGGCTCTTGCTGTCTGACTCAAATA | |
| | | ATCTTTATTTTTCAGTCCTCAAGGCTCTTCGATAG | |
| | | CAGTTGTTCTGTATCAGCCTTATAGGTGTCAGGT | |
| | | ATAGCACTCAACATCTCATCTCATTACAATAGCA | |
| | | ACCCTCATCACCATAGCAACAGCTAACCTCTGTT | |
| | | ATCCTCACTTCATAGCCAGGAAGCTGAGCGACTA | |
| | | AGTCACTTGCCCACAGAGTATCAGCTCTCAGATT | |
| | | TCTGTTCTTCAGCCACTGTCCTTTCAGGATAGAAT | |
| | | TTGTCGTTAAGAAATTAATTTAAAAACTGATTAT | |
| | | TGAGTAGCATTGTATATCAATCACAACATGCCTT | |
| | | GTGCACTGTGCTGGCCTCTGAGCATAAAGATGTA | |
| | | CGCCGGAGTACCGGTCGGACATGTTTATGTGTGT | |
| | | TAAATACTCAGAGAAATGTTCATTAACAAGGAGC | |
| | | TTGCATTTTAGAGACACTGGAAAGTAACTCCAGT | |
| | | TCATTGTCTAGCATTACATTTACCTCATTTGCTAT | |
| | | CCTTGCCATACAGTCTCTTGTTCTCCATGAAGTGT | |
| | | CATGAATCTTGTTGAATAGTTCTTTTATTTTTTAA | |
| | | ATGTTTCTATTTAAATGATATTGACATCTGAGGC | |
| | | GATAGCTCAGTTGGTAAAACCCTTTCCTCACAAG | |
| | | TGTGAAACCCTGAGTCTTATCCCTAGAACCCACA | |
| | | TAAAAAACAGTTGCGTATGTTTGTGCATGCTTTT | |
| | | GATCCCAGCACTAGGGAGGCAGAGGCAGGCAGA | |
| | | TCCTGAGCTCTCATTGACCACCCAGCCTAGCCTA | |
| | | CATGGTTAGCTCCAGGCCTACAGGAGCTGGCAGA | |
| | | GCCTGAAAAACGATGCCTAGACACACACACACA | |
| | | CACACACACACACACACACACACACACACACCA | |
| | | TGTACTCATAGACCTAAGTGCACCCTCCTACACA | |
| | | TGCACACACATACAATTCAAACACAAATCAACAG | |
| | | GGAATTGTCTCAGAATGGTCCCCAAGACAAAGA | |
| | | AGAAGAAAAACACCAAACCAGCTCTATTCCCTCA | |
| | | GCCTATCCTCTCTACTCCTTCCTAGAAGCAACTAC | |
| | | TATTGTTTTTGTATATAAATTTACCCAACGACAGT | |
| | | TAATATGTAGAATATATATTAAAGTGTCTGTCAA | |
| | | TATATATTATCTCTTTCTTTCTTTCTTCCTTTCTTT | |
| | | CTTTCTTTCTTTCTTTCTTTCTTTCTTTCTTTCTTTC | |
| | | TTTCTTCCTTCCTTCCTTCCTTCCTTCCTTCCTTCC | |
| | | TTCCTTTCTTTCTTTCTTTCTTTTTTTCTGTCTATCT | |
| | | GTACCTAAATGGTTGCTCACTATGCATTTTCTGTG | |
| | | CTCTTCGCCCTTTTTATTTAATGTATGGATATTTA | |
| | | TGCTGCTTCCAGAATGGATCTAAAGCTCTTTGTTT | |
| | | CTAGGTTTTCTCCCCCATCCTTCTAGGCATCTCTC | |
| | | ACACTGTCTAGGCCAGACACCATGTCTGCTGCCT | |
| | | GAATCTGTAGACACCATTTATAAAGCACGTACTC | |
| | | ACCGAGTTTGTATTTGGCTTGTTCTGTGTCTGATT | |
| | | AAAGGGAGACCATGAGTCCCCAGGGTACACTGA | |
| | | GTTACCCCAGTACCAAGGGGGAGCCTTGTTTGTG | |
| | | TCTCCATGGCAGAAGCAGGCCTGGAGCCATTTTG | |
| | | GTTTCTTCCTTGACTTCTCTCAAACACAGACGCCT | |
| | | CACTTGCTCATTACAGGTTCTCCTTTGGGAATGTC | |
| | | AGCATTGCTCCTTGACTGCTGGCTGCCCTGGAAG | |
| | | GAGCCCATTAGCTCTGTGTGAGCCCTTGACAGCT | |
| | | ACTGCCTCTCCTTACCACAGGGGCCTCTAAGATA | |
| | | CTGTTACCTAGAGGTCTTGAGGATCTGTGTTCTCT | |
| | | GGGGGGAGGAAAGGAGGAGGAACCCAGAACTTT | |
| | | CTTACAGTTTTCCTTGTTCTGTCACATGTCAAGAC | |
| | | TGAAGGAACAGGCTGGGCTACGTAGTGAGATCCT | |
| | | GTCTCAAAGGAAAGACGAGCATAGCCGAACCCC | |
| | | CGGTGGAACCCCCTCTGTTACCTGTTCACACAAG | |
| | | CTTATTGATGAGTCTCATGTTAATGTCTTGTTTGT | |
| | | ATGAAGTTTAAGAAAATATCGGGTTGGGCAACAC | |
| | | ATTCTATTTATTCATTTTATTTGAAATCTTAATGC | |
| | | CATCTCATGGTGTTGGATTGGTGTGGCACTTTATT | |
| | | CTTTTGTGTTGTGTATAACCATAAATTTTATTTTG | |
| | | CATCAGATTGTCAATGTATTGCATTAATTTAATA | |
| | | AATATTTTTATTTATTAAAAAAAAAAAAAAAAA | |
| Rattus | NM_ | ATGAGGATATTTGCTGTCCTTATAGTCACAGCCT | 1040 |
| nor- | 001191954.1 | GCAGTCACGTGCTAGCGGCATTTACCATCACAGC | |
| vegicus | | TCCAAAGGACCTGTACGTGGTGGAGTATGGCAGC | |
| CD274 | | AATGTCACGATGGAATGCAGATTCCCAGTAGAAC | |
| mRNA | | AGAAATTGGACCTGCTTGCCTTAGTGGTGTACTG | |
| | | GGAAAAGGAAGACAAGGAAGTTATTCAGTTTGT | |
| | | GGAGGGAGAGGAGGACCTGAAGCCTCAACACAG | |
| | | CAGCTTCAGGGGGAGAGCCTTCTTGCCAAAGGAC | |
| | | CAGCTTTTGAAGGGGAACGCGGTGCTTCAGATCA | |
| | | CAGATGTCAAGCTGCAGGACGCAGGTGTCTACTG | |
| | | CTGCATGATCAGCTATGGTGGAGCGGACTACAAG | |
| | | CGAATCACATTGAAAGTCAACGCTCCATACCGCA | |
| | | AAATCAACCAAAGAATTTCCATGGATCCAGCCAC | |
| | | TTCTGAGCATGAACTAATGTGCCAGGCTGAGGGT | |
| | | TACCCAGAAGCCGAAGTGATCTGGACAAACAGT | |
| | | GACCACCAGTCCCTGAGTGGGGAAACAACTGTCA | |
| | | CCACTTCCCAGACTGAGGAGAAGCTTCTCAACGT | |
| | | GACCAGCGTTCTGAGGGTCAACGCAACAGCTAAT | |
| | | GATGTTTTCCACTGTACGTTCTGGAGAGTACACT | |
| | | CAGGGGAGAACCACACGGCTGAACTGATCATCC | |
| | | CAGAACTGCCTGTACCACGTCTCCCACATAACAG | |
| | | GACACACTGGGTACTCCTGGGATCCGTCCTTTTG | |
| | | TTCCTCATCGTGGGGTTCACCGTCTTCTTCTGCTT | |
| | | GAGAAAACAAGTGAGAATGCTAGATGTGGAAAA | |
| | | ATGCGGCTTCGAAGATAGAAATTCAAAGAACCG | |
| | | AAATGATACACAGTTCGAGGAGACGTAA | |
| GalXC- | Unmodified | AGGAUAGAAUUUGUCGUUAAGCAGCCGAAAGG | 1041 |
| mCD274 | 36 mer | CUGC | |
| GalXC- | Unmodified | UUAACGACAAAUUCUAUCCUGG | 1042 |
| mCD274 | 22 mer | | |
| GalXC- | Unmodified | GGUGGAUGAAACUCAGUUUAGCAGCCGAAAGG | 1043 |
| ALDH2- | 36 mer | CUGC | |
| C18 | | | |
| GalXC- | Unmodified | UAAACUGAGUUUCAUCCACCGG | 1044 |
| ALDH2- | 22 mer | | |
| C18 | | | |
| GalXC- | Modified 36 | [mGs][mG][fU][mG][fG][mA][mU][fG][mA][fA][mA] | 1045 |
| ALDH2- | mer | [fC][fU][mC][fA][mG][fU][mU][mU][mA][mG][mC][mA] | |
| C18 | | [mG][mC][mC][mG][ademA- | |
| | | C18][mA][mA][mG][mG][mC][mU][mG][mC] | |
| GalXC- | Modified 22 | [MePhosphonate-4O- | 1046 |
| ALDH2- | mer | mUs][fAs][fA][fA][fC][mU][fG][mA][mG][fU][mU] | |
| C18 | | [mU][mC][fA][mU][fC][mC][mA][fC][mCs][mGs][mG] | |
| GalXC- | Modified 36 | [mGs][mG][fU][mG][fG][mA][mU][fG][mA][fA][mA] | 1047 |
| ALDH2- | mer | [fC][fU][mC][fA][mG][fU][mU][mU][mA][mG][mC][mA] | |
| C16 | | [mG][mC][mC][mG][ademA- | |
| | | C16][mA][mA][mG][mG][mC][mU][mG][mC] | |
| GalXC- | Modified | [mGs][mG][fU][mG][fG][mA][mU][fG][mA][fA][mA] | 1048 |
| ALDH2- | 36 mer | [fC][fU][mC][fA][mG][fU][mU][mU][mA][mG][mC][mA] | |
| C22 | | [mG][mC][mC][mG][ademA- | |
| | | C18][mA][mA][mG][mG][mC] | |
| | | [mU][mG][mC] | |
| GalXC- | Modified | [mGs][mG][fU][mG][fG][mA][mU][fG][mA][fA][mA] | 1049 |
| ALDH2- | 36 mer | [fC][fU][mC][fA][mG][fU][mU][mU][mA][mG][mC][mA] | |
| C24 | | [mG][mC][mC][mG][ademA- | |
| | | C22][mA][mA][mG][mG][mC] | |
| | | [mU][mG][mC] | |
| CD274- | Modified | [ademGs- | 1050 |
| 0098 | 36 mer | C18][mG][mA][mU][mA][mU][mU][fU][fG][fC][fU] | |
| | | [mG][mU][mC][mU][mU][mU][mA][mU][mA][mG][mC] | |
| | | [mA][mG][mC][mC][mG][mA][mA][mA][mG][mG][mC] | |
| | | [mU][mG][mC] | |

The application's sequence listing, which the Patent Office published only in electronic form, follows.

SEQUENCE LISTING (1050 sequences)

SEQ ID NO: 1 - RNA, 19 nt, synthetic construct
  misc_feature 1..19: note = Synthetic: CD274-0088
  source 1..19: mol_type = other RNA
agaaagatgaggatatttg

SEQ ID NO: 2 - RNA, 19 nt, synthetic construct
  misc_feature 1..19: note = Synthetic: CD274-0094
  source 1..19: mol_type = other RNA
atgaggatatttgctgtct

SEQ ID NO: 3 - skipped

SEQ ID NO: 4 - RNA, 19 nt, synthetic construct
  misc_feature 1..19: note = Synthetic: CD274-0097
  source 1..19: mol_type = other RNA
aggatatttgctgtcttta

SEQ ID NO: 5 - RNA, 19 nt, synthetic construct
  misc_feature 1..19: note = Synthetic: CD274-0098
  source 1..19: mol_type = other RNA
ggatatttgctgtctttat

SEQ ID NO: 6 - RNA, 19 nt, synthetic construct
  misc_feature 1..19: note = Synthetic: CD274-0100
  source 1..19: mol_type = other RNA
atatttgctgtctttatat

SEQ ID NO: 7 - RNA, 19 nt, synthetic construct
  misc_feature 1..19: note = Synthetic: CD274-0102
  source 1..19: mol_type = other RNA
atttgctgtctttatattc

SEQ ID NO: 8 - RNA, 19 nt, synthetic construct
  misc_feature 1..19: note = Synthetic: CD274-0167
  source 1..19: mol_type = other RNA
aggacctatatgtggtaga

SEQ ID NO: 9 - RNA, 19 nt, synthetic construct
  misc_feature 1..19: note = Synthetic: CD274-0193
  source 1..19: mol_type = other RNA
agcaatatgacaattgaat

SEQ ID NO: 10 - RNA, 19 nt, synthetic construct
  misc_feature 1..19: note = Synthetic: CD274-0194
  source 1..19: mol_type = other RNA
gcaatatgacaattgaatg

SEQ ID NO: 11 - RNA, 19 nt, synthetic construct
  misc_feature 1..19: note = Synthetic: CD274-0197
  source 1..19: mol_type = other RNA
atatgacaattgaatgcaa

SEQ ID NO: 12 - RNA, 19 nt, synthetic construct
  misc_feature 1..19: note = Synthetic: CD274-0200
  source 1..19: mol_type = other RNA
tgacaattgaatgcaaatt

SEQ ID NO: 13 - RNA, 19 nt, synthetic construct
  misc_feature 1..19: note = Synthetic: CD274-0204
  source 1..19: mol_type = other RNA
aattgaatgcaaattccca

SEQ ID NO: 14 - RNA, 19 nt, synthetic construct
  misc_feature 1..19: note = Synthetic: CD274-0219
  source 1..19: mol_type = other RNA
cccagtagaaaaacaatta

SEQ ID NO: 15 - RNA, 19 nt, synthetic construct
  misc_feature 1..19: note = Synthetic: CD274-0222
  source 1..19: mol_type = other RNA
agtagaaaaacaattagac

SEQ ID NO: 16 - RNA, 19 nt, synthetic construct
  misc_feature 1..19: note = Synthetic: CD274-0225
  source 1..19: mol_type = other RNA
agaaaaacaattagacctg

SEQ ID NO: 17 - RNA, 19 nt, synthetic construct
  misc_feature 1..19: note = Synthetic: CD274-0268
  source 1..19: mol_type = other RNA
atggaggataagaacatta

SEQ ID NO: 18 - RNA, 19 nt, synthetic construct
  misc_feature 1..19: note = Synthetic: CD274-0269
  source 1..19: mol_type = other RNA
tggaggataagaacattat

SEQ ID NO: 19 - RNA, 19 nt, synthetic construct
  misc_feature 1..19: note = Synthetic: CD274-0271
  source 1..19: mol_type = other RNA
gaggataagaacattattc

SEQ ID NO: 20 - RNA, 19 nt, synthetic construct
  misc_feature 1..19: note = Synthetic: CD274-0274
  source 1..19: mol_type = other RNA
gataagaacattattcaat

SEQ ID NO: 21 - RNA, 19 nt, synthetic construct
  misc_feature 1..19: note = Synthetic: CD274-0275
  source 1..19: mol_type = other RNA
ataagaacattattcaatt

SEQ ID NO: 22 - RNA, 19 nt, synthetic construct
  misc_feature 1..19: note = Synthetic: CD274-0277
  source 1..19: mol_type = other RNA
aagaacattattcaatttg

SEQ ID NO: 23 - RNA, 19 nt, synthetic construct
  misc_feature 1..19: note = Synthetic: CD274-0282
  source 1..19: mol_type = other RNA
cattattcaatttgtgcat

SEQ ID NO: 24 - RNA, 19 nt, synthetic construct
  misc_feature 1..19: note = Synthetic: CD274-0283
  source 1..19: mol_type = other RNA
attattcaatttgtgcatg

SEQ ID NO: 25 - RNA, 19 nt, synthetic construct
  misc_feature 1..19: note = Synthetic: CD274-0394
  source 1..19: mol_type = other RNA
atcacagatgtgaaattgc

SEQ ID NO: 26 - RNA, 19 nt, synthetic construct
  misc_feature 1..19: note = Synthetic: CD274-0399
  source 1..19: mol_type = other RNA
agatgtgaaattgcaggat

SEQ ID NO: 27 - RNA, 19 nt, synthetic construct
  misc_feature 1..19: note = Synthetic: CD274-0530
  source 1..19: mol_type = other RNA
cagtcacctctgaacatga

SEQ ID NO: 28 - RNA, 19 nt, synthetic construct
  misc_feature 1..19: note = Synthetic: CD274-0531
  source 1..19: mol_type = other RNA
agtcacctctgaacatgaa

SEQ ID NO: 29 - RNA, 19 nt, synthetic construct
  misc_feature 1..19: note = Synthetic: CD274-0653
  source 1..19: mol_type = other RNA
aggagaagcttttcaatgt

SEQ ID NO: 30 - RNA, 19 nt, synthetic construct
  misc_feature 1..19: note = Synthetic: CD274-0673
  source 1..19: mol_type = other RNA
accagcacactgagaatca

SEQ ID NO: 31 - RNA, 19 nt, synthetic construct
  misc_feature 1..19: note = Synthetic: CD274-0693
  source 1..19: mol_type = other RNA
cacaacaactaatgagatt

SEQ ID NO: 32 - RNA, 19 nt, synthetic construct
  misc_feature 1..19: note = Synthetic: CD274-0697
  source 1..19: mol_type = other RNA
acaactaatgagattttct

SEQ ID NO: 33 - RNA, 19 nt, synthetic construct
  misc_feature 1..19: note = Synthetic: CD274-0700
  source 1..19: mol_type = other RNA
actaatgagattttctact

SEQ ID NO: 34 - RNA, 19 nt, synthetic construct
  misc_feature 1..19: note = Synthetic: CD274-0701
  source 1..19: mol_type = other RNA
ctaatgagattttctactg

SEQ ID NO: 35 - RNA, 19 nt, synthetic construct
  misc_feature 1..19: note = Synthetic: CD274-0743
  source 1..19: mol_type = other RNA
aggaaaaccatacagctga

SEQ ID NO: 36 - RNA, 19 nt, synthetic construct
  misc_feature 1..19: note = Synthetic: CD274-0746
  source 1..19: mol_type = other RNA
aaaaccatacagctgaatt

SEQ ID NO: 37 - RNA, 19 nt, synthetic construct
  misc_feature 1..19: note = Synthetic: CD274-0095
  source 1..19: mol_type = other RNA
tgaggatatttgctgtctt

SEQ ID NO: 38 - RNA, 19 nt, synthetic construct
  misc_feature 1..19: note = Synthetic: CD274-0099
  source 1..19: mol_type = other RNA
gatatttgctgtctttata

SEQ ID NO: 39 - RNA, 19 nt, synthetic construct
  misc_feature 1..19: note = Synthetic: CD274-0103
  source 1..19: mol_type = other RNA
tttgctgtctttatattca

SEQ ID NO: 40 - RNA, 19 nt, synthetic construct
  misc_feature 1..19: note = Synthetic: CD274-0195
  source 1..19: mol_type = other RNA
caatatgacaattgaatgc

SEQ ID NO: 41 - RNA, 19 nt, synthetic construct
  misc_feature 1..19: note = Synthetic: CD274-0196
  source 1..19: mol_type = other RNA
aatatgacaattgaatgca

SEQ ID NO: 42 - RNA, 19 nt, synthetic construct
  misc_feature 1..19: note = Synthetic: CD274-0198
  source 1..19: mol_type = other RNA
tatgacaattgaatgcaaa

SEQ ID NO: 43 - RNA, 19 nt, synthetic construct
  misc_feature 1..19: note = Synthetic: CD274-0199
  source 1..19: mol_type = other RNA
atgacaattgaatgcaaat

SEQ ID NO: 44 - RNA, 19 nt, synthetic construct
  misc_feature 1..19: note = Synthetic: CD274-0201
  source 1..19: mol_type = other RNA
gacaattgaatgcaaattc

SEQ ID NO: 45 - RNA, 19 nt, synthetic construct
  misc_feature 1..19: note = Synthetic: CD274-0202
  source 1..19: mol_type = other RNA
acaattgaatgcaaattcc

SEQ ID NO: 46 - RNA, 19 nt, synthetic construct
  misc_feature 1..19: note = Synthetic: CD274-0207
  source 1..19: mol_type = other RNA
tgaatgcaaattcccagta

SEQ ID NO: 47 - RNA, 19 nt, synthetic construct
  misc_feature 1..19: note = Synthetic: CD274-0221
  source 1..19: mol_type = other RNA
cagtagaaaaacaattaga

SEQ ID NO: 48 - RNA, 19 nt, synthetic construct
  misc_feature 1..19: note = Synthetic: CD274-0245
  source 1..19: mol_type = other RNA
ctgcactaattgtctattg

SEQ ID NO: 49 - RNA, 19 nt, synthetic construct
  misc_feature 1..19: note = Synthetic: CD274-0248
  source 1..19: mol_type = other RNA
cactaattgtctattggga

SEQ ID NO: 50 - RNA, 19 nt, synthetic construct
  misc_feature 1..19: note = Synthetic: CD274-0249
  source 1..19: mol_type = other RNA
actaattgtctattgggaa

SEQ ID NO: 51 - RNA, 19 nt, synthetic construct
  misc_feature 1..19: note = Synthetic: CD274-0265
  source 1..19: mol_type = other RNA
gaaatggaggataagaaca

SEQ ID NO: 52 - RNA, 19 nt, synthetic construct
  misc_feature 1..19: note = Synthetic: CD274-0266
  source 1..19: mol_type = other RNA
aaatggaggataagaacat

SEQ ID NO: 53 - RNA, 19 nt, synthetic construct
  misc_feature 1..19: note = Synthetic: CD274-0267
  source 1..19: mol_type = other RNA
aatggaggataagaacatt

SEQ ID NO: 54 - RNA, 19 nt, synthetic construct
  misc_feature 1..19: note = Synthetic: CD274-0270
  source 1..19: mol_type = other RNA
ggaggataagaacattatt

SEQ ID NO: 55 - RNA, 19 nt, synthetic construct
  misc_feature 1..19: note = Synthetic: CD274-0272
  source 1..19: mol_type = other RNA
aggataagaacattattca

SEQ ID NO: 56 - RNA, 19 nt, synthetic construct
  misc_feature 1..19: note = Synthetic: CD274-0273
  source 1..19: mol_type = other RNA
ggataagaacattattcaa

SEQ ID NO: 57 - RNA, 19 nt, synthetic construct
  misc_feature 1..19: note = Synthetic: CD274-0276
  source 1..19: mol_type = other RNA
taagaacattattcaattt

SEQ ID NO: 58 - RNA, 19 nt, synthetic construct
  misc_feature 1..19: note = Synthetic: CD274-0278
  source 1..19: mol_type = other RNA
agaacattattcaatttgt

SEQ ID NO: 59 - RNA, 19 nt, synthetic construct
  misc_feature 1..19: note = Synthetic: CD274-0279
  source 1..19: mol_type = other RNA
gaacattattcaatttgtg

SEQ ID NO: 60 - RNA, 19 nt, synthetic construct
  misc_feature 1..19: note = Synthetic: CD274-0280
  source 1..19: mol_type = other RNA
aacattattcaatttgtgc

SEQ ID NO: 61 - RNA, 19 nt, synthetic construct
  misc_feature 1..19: note = Synthetic: CD274-0281
  source 1..19: mol_type = other RNA
acattattcaatttgtgca

SEQ ID NO: 62 - RNA, 19 nt, synthetic construct
  misc_feature 1..19: note = Synthetic: CD274-0285
  source 1..19: mol_type = other RNA
tattcaatttgtgcatgga

SEQ ID NO: 63 - RNA, 19 nt, synthetic construct
  misc_feature 1..19: note = Synthetic: CD274-0303
  source 1..19: mol_type = other RNA
agaggaagacctgaaggtt

SEQ ID NO: 64 - RNA, 19 nt, synthetic construct
  misc_feature 1..19: note = Synthetic: CD274-0305
  source 1..19: mol_type = other RNA
aggaagacctgaaggttca

SEQ ID NO: 65 - RNA, 19 nt, synthetic construct
  misc_feature 1..19: note = Synthetic: CD274-0308
  source 1..19: mol_type = other RNA
aagacctgaaggttcagca

SEQ ID NO: 66 - RNA, 19 nt, synthetic construct
  misc_feature 1..19: note = Synthetic: CD274-0309
  source 1..19: mol_type = other RNA
agacctgaaggttcagcat

SEQ ID NO: 67 - RNA, 19 nt, synthetic construct
  misc_feature 1..19: note = Synthetic: CD274-0310
  source 1..19: mol_type = other RNA
gacctgaaggttcagcata

SEQ ID NO: 68 - RNA, 19 nt, synthetic construct
  misc_feature 1..19: note = Synthetic: CD274-0312
  source 1..19: mol_type = other RNA
cctgaaggttcagcatagt

SEQ ID NO: 69 - RNA, 19 nt, synthetic construct
  misc_feature 1..19: note = Synthetic: CD274-0313
  source 1..19: mol_type = other RNA
ctgaaggttcagcatagta

SEQ ID NO: 70 - RNA, 19 nt, synthetic construct
  misc_feature 1..19: note = Synthetic: CD274-0392
  source 1..19: mol_type = other RNA
agatcacagatgtgaaatt

SEQ ID NO: 71 - RNA, 19 nt, synthetic construct
  misc_feature 1..19: note = Synthetic: CD274-0395
  source 1..19: mol_type = other RNA
tcacagatgtgaaattgca

SEQ ID NO: 72 - RNA, 19 nt, synthetic construct
  misc_feature 1..19: note = Synthetic: CD274-0398
  source 1..19: mol_type = other RNA
cagatgtgaaattgcagga

SEQ ID NO: 73 - RNA, 19 nt, synthetic construct
  misc_feature 1..19: note = Synthetic: CD274-0497
  source 1..19: mol_type = other RNA
acaaaatcaaccaaagaat

SEQ ID NO: 74 - RNA, 19 nt, synthetic construct
  misc_feature 1..19: note = Synthetic: CD274-0499
  source 1..19: mol_type = other RNA
aaaatcaaccaaagaattt

SEQ ID NO: 75 - RNA, 19 nt, synthetic construct
  misc_feature 1..19: note = Synthetic: CD274-0500
  source 1..19: mol_type = other RNA
aaatcaaccaaagaatttt

SEQ ID NO: 76 - RNA, 19 nt, synthetic construct
  misc_feature 1..19: note = Synthetic: CD274-0501
  source 1..19: mol_type = other RNA
aatcaaccaaagaattttg

SEQ ID NO: 77 - RNA, 19 nt, synthetic construct
  misc_feature 1..19: note = Synthetic: CD274-0502
  source 1..19: mol_type = other RNA
atcaaccaaagaattttgg

SEQ ID NO: 78 - RNA, 19 nt, synthetic construct
  misc_feature 1..19: note = Synthetic: CD274-0504
  source 1..19: mol_type = other RNA
caaccaaagaattttggtt

SEQ ID NO: 79 - RNA, 19 nt, synthetic construct
  misc_feature 1..19: note = Synthetic: CD274-0505
  source 1..19: mol_type = other RNA
aaccaaagaattttggttg

SEQ ID NO: 80 - RNA, 19 nt, synthetic construct
  misc_feature 1..19: note = Synthetic: CD274-0506
  source 1..19: mol_type = other RNA
accaaagaattttggttgt

SEQ ID NO: 81 - RNA, 19 nt, synthetic construct
  misc_feature 1..19: note = Synthetic: CD274-0507
  source 1..19: mol_type = other RNA
ccaaagaattttggttgtg

SEQ ID NO: 82 - RNA, 19 nt, synthetic construct
  misc_feature 1..19: note = Synthetic: CD274-0509
  source 1..19: mol_type = other RNA
aaagaattttggttgtgga

SEQ ID NO: 83 - RNA, 19 nt, synthetic construct
  misc_feature 1..19: note = Synthetic: CD274-0510
  source 1..19: mol_type = other RNA
aagaattttggttgtggat

SEQ ID NO: 84 - RNA, 19 nt, synthetic construct
  misc_feature 1..19: note = Synthetic: CD274-0511
  source 1..19: mol_type = other RNA
agaattttggttgtggatc

SEQ ID NO: 85 - RNA, 19 nt, synthetic construct
  misc_feature 1..19: note = Synthetic: CD274-0513
  source 1..19: mol_type = other RNA
aattttggttgtggatcca

SEQ ID NO: 86 - RNA, 19 nt, synthetic construct
  misc_feature 1..19: note = Synthetic: CD274-0535
  source 1..19: mol_type = other RNA
acctctgaacatgaactga

SEQ ID NO: 87 - RNA, 19 nt, synthetic construct
  misc_feature 1..19: note = Synthetic: CD274-0537
  source 1..19: mol_type = other RNA
ctctgaacatgaactgaca

SEQ ID NO: 88 - RNA, 19 nt, synthetic construct
  misc_feature 1..19: note = Synthetic: CD274-0542
  source 1..19: mol_type = other RNA
aacatgaactgacatgtca

SEQ ID NO: 89 - RNA, 19 nt, synthetic construct
  misc_feature 1..19: note = Synthetic: CD274-0583
  source 1..19: mol_type = other RNA
gaagtcatctggacaagca

SEQ ID NO: 90 - RNA, 19 nt, synthetic construct
  misc_feature 1..19: note = Synthetic: CD274-0594
  source 1..19: mol_type = other RNA
gacaagcagtgaccatcaa

SEQ ID NO: 91 - RNA, 19 nt, synthetic construct
  misc_feature 1..19: note = Synthetic: CD274-0601
  source 1..19: mol_type = other RNA
agtgaccatcaagtcctga

SEQ ID NO: 92 - RNA, 19 nt, synthetic construct
  misc_feature 1..19: note = Synthetic: CD274-0654
  source 1..19: mol_type = other RNA
ggagaagcttttcaatgtg

SEQ ID NO: 93 - RNA, 19 nt, synthetic construct
  misc_feature 1..19: note = Synthetic: CD274-0655
  source 1..19: mol_type = other RNA
gagaagcttttcaatgtga

SEQ ID NO: 94 - RNA, 19 nt, synthetic construct
  misc_feature 1..19: note = Synthetic: CD274-0656
  source 1..19: mol_type = other RNA
agaagcttttcaatgtgac

SEQ ID NO: 95 - RNA, 19 nt, synthetic construct
  misc_feature 1..19: note = Synthetic: CD274-0658
  source 1..19: mol_type = other RNA
aagcttttcaatgtgacca

SEQ ID NO: 96 - RNA, 19 nt, synthetic construct
  misc_feature 1..19: note = Synthetic: CD274-0661
  source 1..19: mol_type = other RNA
cttttcaatgtgaccagca

SEQ ID NO: 97 - RNA, 19 nt, synthetic construct
  misc_feature 1..19: note = Synthetic: CD274-0667
  source 1..19: mol_type = other RNA
aatgtgaccagcacactga

SEQ ID NO: 98 - RNA, 19 nt, synthetic construct
  misc_feature 1..19: note = Synthetic: CD274-0676
  source 1..19: mol_type = other RNA
agcacactgagaatcaaca

SEQ ID NO: 99 - RNA, 19 nt, synthetic construct
  misc_feature 1..19: note = Synthetic: CD274-0679
  source 1..19: mol_type = other RNA
acactgagaatcaacacaa

SEQ ID NO: 100 - RNA, 19 nt, synthetic construct
  misc_feature 1..19: note = Synthetic: CD274-0681
  source 1..19: mol_type = other RNA
actgagaatcaacacaaca

SEQ ID NO: 101 - RNA, 19 nt, synthetic construct
  misc_feature 1..19: note = Synthetic: CD274-0685
  source 1..19: mol_type = other RNA
agaatcaacacaacaacta

SEQ ID NO: 102 - RNA, 19 nt, synthetic construct
  misc_feature 1..19: note = Synthetic: CD274-0692
  source 1..19: mol_type = other RNA
acacaacaactaatgagat

SEQ ID NO: 103 - RNA, 19 nt, synthetic construct
  misc_feature 1..19: note = Synthetic: CD274-0695
  source 1..19: mol_type = other RNA
caacaactaatgagatttt

SEQ ID NO: 104 - RNA, 19 nt, synthetic construct
  misc_feature 1..19: note = Synthetic: CD274-0696
  source 1..19: mol_type = other RNA
aacaactaatgagattttc

SEQ ID NO: 105 - RNA, 19 nt, synthetic construct
  misc_feature 1..19: note = Synthetic: CD274-0698
  source 1..19: mol_type = other RNA
caactaatgagattttcta

SEQ ID NO: 106 - RNA, 19 nt, synthetic construct
  misc_feature 1..19: note = Synthetic: CD274-0703
  source 1..19: mol_type = other RNA
aatgagattttctactgca

SEQ ID NO: 107 - RNA, 19 nt, synthetic construct
  misc_feature 1..19: note = Synthetic: CD274-0709
  source 1..19: mol_type = other RNA
attttctactgcactttta

SEQ ID NO: 108 - RNA, 19 nt, synthetic construct
  misc_feature 1..19: note = Synthetic: CD274-0745
  source 1..19: mol_type = other RNA
gaaaaccatacagctgaat

SEQ ID NO: 109 - RNA, 19 nt, synthetic construct
  misc_feature 1..19: note = Synthetic: CD274-0749
  source 1..19: mol_type = other RNA
accatacagctgaattggt

SEQ ID NO: 110 - RNA, 19 nt, synthetic construct
  misc_feature 1..19: note = Synthetic: CD274-0752
  source 1..19: mol_type = other RNA
atacagctgaattggtcat

SEQ ID NO: 111 - RNA, 19 nt, synthetic construct
  misc_feature 1..19: note = Synthetic: CD274-0800
  source 1..19: mol_type = other RNA
atgaaaggactcacttggt

SEQ ID NO: 112 - RNA, 19 nt, synthetic construct
  misc_feature 1..19: note = Synthetic: CD274-0804
  source 1..19: mol_type = other RNA
aaggactcacttggtaatt

SEQ ID NO: 113 - RNA, 19 nt, synthetic construct
  misc_feature 1..19: note = Synthetic: CD274-0847
  source 1..19: mol_type = other RNA
ggtgtagcactgacattca

SEQ ID NO: 114 - RNA, 19 nt, synthetic construct
  misc_feature 1..19: note = Synthetic: CD274-0852
  source 1..19: mol_type = other RNA
agcactgacattcatcttc

SEQ ID NO: 115 - RNA, 19 nt, synthetic construct
  misc_feature 1..19: note = Synthetic: CD274-0889
  source 1..19: mol_type = other RNA
atgatggatgtgaaaaaat

SEQ ID NO: 116 - RNA, 19 nt, synthetic construct
  misc_feature 1..19: note = Synthetic: CD274-1172
  source 1..19: mol_type = other RNA
ggagaccttgatactttca

SEQ ID NO: 117 - RNA, 19 nt, synthetic construct
  misc_feature 1..19: note = Synthetic: CD274-1173
  source 1..19: mol_type = other RNA
gagaccttgatactttcaa

SEQ ID NO: 118 - RNA, 19 nt, synthetic construct
  misc_feature 1..19: note = Synthetic: CD274-1174
  source 1..19: mol_type = other RNA
agaccttgatactttcaaa

SEQ ID NO: 119 - RNA, 19 nt, synthetic construct
  misc_feature 1..19: note = Synthetic: CD274-1176
  source 1..19: mol_type = other RNA
accttgatactttcaaatg

SEQ ID NO: 120 - RNA, 19 nt, synthetic construct
  misc_feature 1..19: note = Synthetic: CD274-1178
  source 1..19: mol_type = other RNA
cttgatactttcaaatgcc

SEQ ID NO: 121 - RNA, 19 nt, synthetic construct
  misc_feature 1..19: note = Synthetic: CD274-1227
  source 1..19: mol_type = other RNA
gaaaggatacttctgaaca

SEQ ID NO: 122 - RNA, 19 nt, synthetic construct
  misc_feature 1..19: note = Synthetic: CD274-1231
  source 1..19: mol_type = other RNA
ggatacttctgaacaagga

SEQ ID NO: 123 - RNA, 19 nt, synthetic construct
  misc_feature 1..19: note = Synthetic: CD274-1423
  source 1..19: mol_type = other RNA
ctatttattttgagtctgt

SEQ ID NO: 124 - RNA, 19 nt, synthetic construct
  misc_feature 1..19: note = Synthetic: CD274-1425
  source 1..19: mol_type = other RNA
atttattttgagtctgtga

SEQ ID NO: 125 - RNA, 19 nt, synthetic construct
  misc_feature 1..19: note = Synthetic: CD274-1459
  source 1..19: mol_type = other RNA
tgagtgtggttgtgaatga

SEQ ID NO: 126 - RNA, 19 nt, synthetic construct
  misc_feature 1..19: note = Synthetic: CD274-1460
  source 1..19: mol_type = other RNA
gagtgtggttgtgaatgat

SEQ ID NO: 127 - RNA, 19 nt, synthetic construct
  misc_feature 1..19: note = Synthetic: CD274-1461
  source 1..19: mol_type = other RNA
agtgtggttgtgaatgatt

SEQ ID NO: 128 - RNA, 19 nt, synthetic construct
  misc_feature 1..19: note = Synthetic: CD274-1462
  source 1..19: mol_type = other RNA
gtgtggttgtgaatgattt

SEQ ID NO: 129 - RNA, 19 nt, synthetic construct
  misc_feature 1..19: note = Synthetic: CD274-1463
  source 1..19: mol_type = other RNA
tgtggttgtgaatgatttc

SEQ ID NO: 130 - RNA, 19 nt, synthetic construct
  misc_feature 1..19: note = Synthetic: CD274-1464
  source 1..19: mol_type = other RNA
gtggttgtgaatgatttct

SEQ ID NO: 131 - RNA, 19 nt, synthetic construct
  misc_feature 1..19: note = Synthetic: CD274-1465
  source 1..19: mol_type = other RNA
tggttgtgaatgatttctt

SEQ ID NO: 132 - RNA, 19 nt, synthetic construct
  misc_feature 1..19: note = Synthetic: CD274-1467
  source 1..19: mol_type = other RNA
gttgtgaatgatttctttt

SEQ ID NO: 133 - RNA, 19 nt, synthetic construct
  misc_feature 1..19: note = Synthetic: CD274-1469
  source 1..19: mol_type = other RNA
tgtgaatgatttcttttga

SEQ ID NO: 134 - RNA, 19 nt, synthetic construct
  misc_feature 1..19: note = Synthetic: CD274-1470
  source 1..19: mol_type = other RNA
gtgaatgatttcttttgaa

SEQ ID NO: 135 - RNA, 19 nt, synthetic construct
  misc_feature 1..19: note = Synthetic: CD274-1473
  source 1..19: mol_type = other RNA
aatgatttcttttgaagat

SEQ ID NO: 136 - RNA, 19 nt, synthetic construct
  misc_feature 1..19: note = Synthetic: CD274-1474
  source 1..19: mol_type = other RNA
atgatttcttttgaagata

SEQ ID NO: 137 - RNA, 19 nt, synthetic construct
  misc_feature 1..19: note = Synthetic: CD274-1481
  source 1..19: mol_type = other RNA
cttttgaagatatattgta

SEQ ID NO: 138 - RNA, 19 nt, synthetic construct
  misc_feature 1..19: note = Synthetic: CD274-1484
  source 1..19: mol_type = other RNA
ttgaagatatattgtagta

SEQ ID NO: 139 - RNA, 19 nt, synthetic construct
  misc_feature 1..19: note = Synthetic: CD274-1486
  source 1..19: mol_type = other RNA
gaagatatattgtagtaga

SEQ ID NO: 140 - RNA, 19 nt, synthetic construct
  misc_feature 1..19: note = Synthetic: CD274-1499
  source 1..19: mol_type = other RNA
agtagatgttacaattttg

SEQ ID NO: 141 - RNA, 19 nt, synthetic construct
  misc_feature 1..19: note = Synthetic: CD274-1500
  source 1..19: mol_type = other RNA
gtagatgttacaattttgt

SEQ ID NO: 142 - RNA, 19 nt, synthetic construct
  misc_feature 1..19: note = Synthetic: CD274-1541
  source 1..19: mol_type = other RNA
aatgatttgctcacatcta

SEQ ID NO: 143 - RNA, 19 nt, synthetic construct
  misc_feature 1..19: note = Synthetic: CD274-1562
  source 1..19: mol_type = other RNA
aaaacatggagtatttgta

SEQ ID NO: 144 - RNA, 19 nt, synthetic construct
  misc_feature 1..19: note = Synthetic: CD274-1606
  source 1..19: mol_type = other RNA
caagtatacattggaagca

SEQ ID NO: 145 - RNA, 19 nt, synthetic construct
  misc_feature 1..19: note = Synthetic: CD274-1607
  source 1..19: mol_type = other RNA
aagtatacattggaagcat

SEQ ID NO: 146 - RNA, 19 nt, synthetic construct
  misc_feature 1..19: note = Synthetic: CD274-1649
  source 1..19: mol_type = other RNA
aggatgtcacctttattta

SEQ ID NO: 147 - RNA, 19 nt, synthetic construct
  misc_feature 1..19: note = Synthetic: CD274-1728
  source 1..19: mol_type = other RNA
ctgttccatttaaatatca

SEQ ID NO: 148 - RNA, 19 nt, synthetic construct
  misc_feature 1..19: note = Synthetic: CD274-1794
  source 1..19: mol_type = other RNA
tgtaaccaccctgttgtga

SEQ ID NO: 149 - RNA, 19 nt, synthetic construct
  misc_feature 1..19: note = Synthetic: CD274-1795
  source 1..19: mol_type = other RNA
gtaaccaccctgttgtgat

SEQ ID NO: 150 - RNA, 19 nt, synthetic construct
  misc_feature 1..19: note = Synthetic: CD274-1806
  source 1..19: mol_type = other RNA
gttgtgataaccactatta

SEQ ID NO: 151 - RNA, 19 nt, synthetic construct
  misc_feature 1..19: note = Synthetic: CD274-1807
  source 1..19: mol_type = other RNA
ttgtgataaccactattat

SEQ ID NO: 152 - RNA, 19 nt, synthetic construct
  misc_feature 1..19: note = Synthetic: CD274-1808
  source 1..19: mol_type = other RNA
tgtgataaccactattatt

SEQ ID NO: 153 - RNA, 19 nt, synthetic construct
  misc_feature 1..19: note = Synthetic: CD274-1809
  source 1..19: mol_type = other RNA
gtgataaccactattattt

SEQ ID NO: 154 - RNA, 19 nt, synthetic construct
  misc_feature 1..19: note = Synthetic: CD274-1810
  source 1..19: mol_type = other RNA
tgataaccactattatttt

SEQ ID NO: 155 - RNA, 19 nt, synthetic construct
  misc_feature 1..19: note = Synthetic: CD274-1811
  source 1..19: mol_type = other RNA
gataaccactattatttta

SEQ ID NO: 156 - RNA, 19 nt, synthetic construct
  misc_feature 1..19: note = Synthetic: CD274-1812
  source 1..19: mol_type = other RNA
ataaccactattattttac

SEQ ID NO: 157 - RNA, 19 nt, synthetic construct
  misc_feature 1..19: note = Synthetic: CD274-1906
  source 1..19: mol_type = other RNA
ccactgtccttttataata

SEQ ID NO: 158 - RNA, 19 nt, synthetic construct
  misc_feature 1..19: note = Synthetic: CD274-1907
  source 1..19: mol_type = other RNA
cactgtccttttataatac

SEQ ID NO: 159 - RNA, 19 nt, synthetic construct
  misc_feature 1..19: note = Synthetic: CD274-1908
  source 1..19: mol_type = other RNA
actgtccttttataataca

SEQ ID NO: 160 - RNA, 19 nt, synthetic construct
  misc_feature 1..19: note = Synthetic: CD274-1909
  source 1..19: mol_type = other RNA
ctgtccttttataatacaa

SEQ ID NO: 161 - RNA, 19 nt, synthetic construct
  misc_feature 1..19: note = Synthetic: CD274-1910
  source 1..19: mol_type = other RNA
tgtccttttataatacaat

SEQ ID NO: 162 - RNA, 19 nt, synthetic construct
  misc_feature 1..19: note = Synthetic: CD274-1913
  source 1..19: mol_type = other RNA
ccttttataatacaattta

SEQ ID NO: 163 - RNA, 19 nt, synthetic construct
  misc_feature 1..19: note = Synthetic: CD274-1915
  source 1..19: mol_type = other RNA
ttttataatacaatttaca

SEQ ID NO: 164 - RNA, 19 nt, synthetic construct
  misc_feature 1..19: note = Synthetic: CD274-1919
  source 1..19: mol_type = other RNA
ataatacaatttacagcta

SEQ ID NO: 165 - RNA, 19 nt, synthetic construct
  misc_feature 1..19: note = Synthetic: CD274-1931
  source 1..19: mol_type = other RNA
acagctatattttacttta

SEQ ID NO: 166 - RNA, 19 nt, synthetic construct
  misc_feature 1..19: note = Synthetic: CD274-1935
  source 1..19: mol_type = other RNA
ctatattttactttaagca

SEQ ID NO: 167 - RNA, 19 nt, synthetic construct
  misc_feature 1..19: note = Synthetic: CD274-1937
  source 1..19: mol_type = other RNA
atattttactttaagcaat

SEQ ID NO: 168 - RNA, 19 nt, synthetic construct
  misc_feature 1..19: note = Synthetic: CD274-2014
  source 1..19: mol_type = other RNA
attgaatctacagatgtga

SEQ ID NO: 169 - RNA, 19 nt, synthetic construct
  misc_feature 1..19: note = Synthetic: CD274-2088
  source 1..19: mol_type = other RNA
gaaaatgtattattacaat

SEQ ID NO: 170 - RNA, 19 nt, synthetic construct
  misc_feature 1..19: note = Synthetic: CD274-2221
  source 1..19: mol_type = other RNA
ataatcagagtaattttca

SEQ ID NO: 171 - RNA, 19 nt, synthetic construct
  misc_feature 1..19: note = Synthetic: CD274-2225
  source 1..19: mol_type = other RNA
tcagagtaattttcattta

SEQ ID NO: 172 - RNA, 19 nt, synthetic construct
  misc_feature 1..19: note = Synthetic: CD274-2227
  source 1..19: mol_type = other RNA
agagtaattttcatttaca

SEQ ID NO: 173 - RNA, 19 nt, synthetic construct
  misc_feature 1..19: note = Synthetic: CD274-2228
  source 1..19: mol_type = other RNA
gagtaattttcatttacaa

SEQ ID NO: 174 - RNA, 19 nt, synthetic construct
  misc_feature 1..19: note = Synthetic: CD274-2229
  source 1..19: mol_type = other RNA
agtaattttcatttacaaa

SEQ ID NO: 175 - RNA, 19 nt, synthetic construct
  misc_feature 1..19: note = Synthetic: CD274-2231
  source 1..19: mol_type = other RNA
taattttcatttacaaaga

SEQ ID NO: 176 - RNA, 19 nt, synthetic construct
  misc_feature 1..19: note = Synthetic: CD274-2233
  source 1..19: mol_type = other RNA
attttcatttacaaagaga

SEQ ID NO: 177 - RNA, 19 nt, synthetic construct
  misc_feature 1..19: note = Synthetic: CD274-2263
  source 1..19: mol_type = other RNA
aaaataaccctgaaaaata

SEQ ID NO: 178 - RNA, 19 nt, synthetic construct
  misc_feature 1..19: note = Synthetic: CD274-2266
  source 1..19: mol_type = other RNA
ataaccctgaaaaataaca

SEQ ID NO: 179 - RNA, 19 nt, synthetic construct
  misc_feature 1..19: note = Synthetic: CD274-2333
  source 1..19: mol_type = other RNA
atataatctaatgcttgtt

SEQ ID NO: 180 - RNA, 19 nt, synthetic construct
  misc_feature 1..19: note = Synthetic: CD274-2335
  source 1..19: mol_type = other RNA
ataatctaatgcttgttta

SEQ ID NO: 181 - RNA, 19 nt, synthetic construct
  misc_feature 1..19: note = Synthetic: CD274-2337
  source 1..19: mol_type = other RNA
aatctaatgcttgtttata

SEQ ID NO: 182 - RNA, 19 nt, synthetic construct
  misc_feature 1..19: note = Synthetic: CD274-2338
  source 1..19: mol_type = other RNA
atctaatgcttgtttatat

SEQ ID NO: 183 - RNA, 19 nt, synthetic construct
  misc_feature 1..19: note = Synthetic: CD274-2339
  source 1..19: mol_type = other RNA
tctaatgcttgtttatata

SEQ ID NO: 184 - RNA, 19 nt, synthetic construct
  misc_feature 1..19: note = Synthetic: CD274-2341
  source 1..19: mol_type = other RNA
taatgcttgtttatatagt

SEQ ID NO: 185 - RNA, 19 nt, synthetic construct
  misc_feature 1..19: note = Synthetic: CD274-2343
  source 1..19: mol_type = other RNA
atgcttgtttatatagtgt

SEQ ID NO: 186 - RNA, 19 nt, synthetic construct
  misc_feature 1..19: note = Synthetic: CD274-2362
  source 1..19: mol_type = other RNA
ctggtattgtttaacagtt

SEQ ID NO: 187 - RNA, 19 nt, synthetic construct
  misc_feature 1..19: note = Synthetic: CD274-2363
  source 1..19: mol_type = other RNA
tggtattgtttaacagttc

SEQ ID NO: 188 - RNA, 19 nt, synthetic construct
  misc_feature 1..19: note = Synthetic: CD274-2407
  source 1..19: mol_type = other RNA
aattttaaattcatacctt

SEQ ID NO: 189 - RNA, 19 nt, synthetic construct
  misc_feature 1..19: note = Synthetic: CD274-2556
  source 1..19: mol_type = other RNA
agtctacatttggaaatgt

SEQ ID NO: 190 - RNA, 19 nt, synthetic construct
  misc_feature 1..19: note = Synthetic: CD274-2557
  source 1..19: mol_type = other RNA
gtctacatttggaaatgta

SEQ ID NO: 191 - RNA, 19 nt, synthetic construct
  misc_feature 1..19: note = Synthetic: CD274-2561
  source 1..19: mol_type = other RNA
acatttggaaatgtatgtt

SEQ ID NO: 192 - RNA, 19 nt, synthetic construct
  misc_feature 1..19: note = Synthetic: CD274-2562
  source 1..19: mol_type = other RNA
catttggaaatgtatgtta

SEQ ID NO: 193 - RNA, 19 nt, synthetic construct
  misc_feature 1..19: note = Synthetic: CD274-2563
  source 1..19: mol_type = other RNA
atttggaaatgtatgttaa

SEQ ID NO: 194 - RNA, 19 nt, synthetic construct
  misc_feature 1..19: note = Synthetic: CD274-2565
  source 1..19: mol_type = other RNA
ttggaaatgtatgttaaaa

SEQ ID NO: 195 - RNA, 19 nt, synthetic construct
  misc_feature 1..19: note = Synthetic: CD274-2568
  source 1..19: mol_type = other RNA
gaaatgtatgttaaaagca

SEQ ID NO: 196 - RNA, 19 nt, synthetic construct
  misc_feature 1..19: note = Synthetic: CD274-2634
  source 1..19: mol_type = other RNA
ctgtgtactttgctatttt

SEQ ID NO: 197 - RNA, 19 nt, synthetic construct
  misc_feature 1..19: note = Synthetic: CD274-2636
  source 1..19: mol_type = other RNA
gtgtactttgctattttta

SEQ ID NO: 198 - RNA, 19 nt, synthetic construct
  misc_feature 1..19: note = Synthetic: CD274-2637
  source 1..19: mol_type = other RNA
tgtactttgctatttttat

SEQ ID NO: 199 - RNA, 19 nt, synthetic construct
  misc_feature 1..19: note = Synthetic: CD274-2640
  source 1..19: mol_type = other RNA
actttgctatttttattta

SEQ ID NO: 200 - RNA, 19 nt, synthetic construct
  misc_feature 1..19: note = Synthetic: CD274-2673
  source 1..19: mol_type = other RNA
atatagcagatggaatgaa

SEQ ID NO: 201 - RNA, 19 nt, synthetic construct
  misc_feature 1..19: note = Synthetic: CD274-2678
  source 1..19: mol_type = other RNA
gcagatggaatgaatttga

SEQ ID NO: 202 - RNA, 19 nt, synthetic construct
  misc_feature 1..19: note = Synthetic: CD274-2679
  source 1..19: mol_type = other RNA
cagatggaatgaatttgaa

SEQ ID NO: 203 - RNA, 19 nt, synthetic construct
  misc_feature 1..19: note = Synthetic: CD274-2801
  source 1..19: mol_type = other RNA
atatacatttagacaacca

SEQ ID NO: 204 - RNA, 19 nt, synthetic construct
  misc_feature 1..19: note = Synthetic: CD274-2815
  source 1..19: mol_type = other RNA
aaccaccatttgttaagta

SEQ ID NO: 205 - RNA, 19 nt, synthetic construct
  misc_feature 1..19: note = Synthetic: CD274-2819
  source 1..19: mol_type = other RNA
accatttgttaagtatttg

SEQ ID NO: 206 - RNA, 19 nt, synthetic construct
  misc_feature 1..19: note = Synthetic: CD274-2924
  source 1..19: mol_type = other RNA
aaaagcaatcttattatta

SEQ ID NO: 207 - RNA, 19 nt, synthetic construct
  misc_feature 1..19: note = Synthetic: CD274-2935
  source 1..19: mol_type = other RNA
tattattaactctgtatga

SEQ ID NO: 208 - RNA, 19 nt, synthetic construct
  misc_feature 1..19: note = Synthetic: CD274-2936
  source 1..19: mol_type = other RNA
attattaactctgtatgac

SEQ ID NO: 209 - RNA, 19 nt, synthetic construct
  misc_feature 1..19: note = Synthetic: CD274-2937
  source 1..19: mol_type = other RNA
ttattaactctgtatgaca

SEQ ID NO: 210 - RNA, 19 nt, synthetic construct
  misc_feature 1..19: note = Synthetic: CD274-2939
  source 1..19: mol_type = other RNA
attaactctgtatgacaga

SEQ ID NO: 211 - RNA, 19 nt, synthetic construct
  misc_feature 1..19: note = Synthetic: CD274-2994
  source 1..19: mol_type = other RNA
agtataaacttcactttga

SEQ ID NO: 212 - RNA, 19 nt, synthetic construct
  misc_feature 1..19: note = Synthetic: CD274-3015
  source 1..19: mol_type = other RNA
ctgtacttgcaaaatcaca

SEQ ID NO: 213 - RNA, 19 nt, synthetic construct
  misc_feature 1..19: note = Synthetic: CD274-3019
  source 1..19: mol_type = other RNA
acttgcaaaatcacatttt

SEQ ID NO: 214 - RNA, 19 nt, synthetic construct
  misc_feature 1..19: note = Synthetic: CD274-3094
  source 1..19: mol_type = other RNA
cctcattcgttgtgcttga

SEQ ID NO: 215 - RNA, 19 nt, synthetic construct
  misc_feature 1..19: note = Synthetic: CD274-3095
  source 1..19: mol_type = other RNA
ctcattcgttgtgcttgaa

SEQ ID NO: 216 - RNA, 19 nt, synthetic construct
  misc_feature 1..19: note = Synthetic: CD274-3305
  source 1..19: mol_type = other RNA
cttgtgttatctgtttgta

SEQ ID NO: 217 - RNA, 19 nt, synthetic construct
  misc_feature 1..19: note = Synthetic: CD274-3306
  source 1..19: mol_type = other RNA
ttgtgttatctgtttgtac

SEQ ID NO: 218 - RNA, 19 nt, synthetic construct
  misc_feature 1..19: note = Synthetic: CD274-3307
  source 1..19: mol_type = other RNA
tgtgttatctgtttgtaca

SEQ ID NO: 219 - RNA, 19 nt, synthetic construct
  misc_feature 1..19: note = Synthetic: CD274-3308
  source 1..19: mol_type = other RNA
gtgttatctgtttgtacat

SEQ ID NO: 220 - RNA, 19 nt, synthetic construct
  misc_feature 1..19: note = Synthetic: CD274-3310
  source 1..19: mol_type = other RNA
gttatctgtttgtacatgt

SEQ ID NO: 221 - RNA, 19 nt, synthetic construct
  misc_feature 1..19: note = Synthetic: CD274-3319
  source 1..19: mol_type = other RNA
ttgtacatgtgcatttgta

SEQ ID NO: 222 - RNA, 19 nt, synthetic construct
  misc_feature 1..19: note = Synthetic: CD274-3325
  source 1..19: mol_type = other RNA
atgtgcatttgtacagtaa

SEQ ID NO: 223 - RNA, 19 nt, synthetic construct
  misc_feature 1..19: note = Synthetic: CD274-3355
  source 1..19: mol_type = other RNA
gtgttctttgtgtgaatta

SEQ ID NO: 224 - RNA, 19 nt, synthetic construct
  misc_feature 1..19: note = Synthetic: CD274-3357
  source 1..19: mol_type = other RNA
gttctttgtgtgaattaca

SEQ ID NO: 225 - RNA, 19 nt, synthetic construct
  misc_feature 1..19: note = Synthetic: CD274-3441
  source 1..19: mol_type = other RNA
ttgtggtgttggatttgta

SEQ ID NO: 226 - RNA, 19 nt, synthetic construct
  misc_feature 1..19: note = Synthetic: CD274-3522
  source 1..19: mol_type = other RNA
attctgcatttgattgtca

SEQ ID NO: 227 - RNA, 19 nt, synthetic construct
  misc_feature 1..19: note = Synthetic: CD274-3528
  source 1..19: mol_type = other RNA
catttgattgtcacttttt

SEQ ID NO: 228 - RNA, 19 nt, synthetic construct
  misc_feature 1..19: note = Synthetic: CD274-3531
  source 1..19: mol_type = other RNA
ttgattgtcactttttgta

SEQ ID NO: 229 - RNA, 19 nt, synthetic construct
  misc_feature 1..19: note = Synthetic: CD274-3532
  source 1..19: mol_type = other RNA
tgattgtcactttttgtac

SEQ ID NO: 230 - RNA, 19 nt, synthetic construct
  misc_feature 1..19: note = Synthetic: CD274-3534
  source 1..19: mol_type = other RNA
attgtcactttttgtacct

SEQ ID NO: 231 - RNA, 19 nt, synthetic construct
  misc_feature 1..19: note = Synthetic: CD274-3541
  source 1..19: mol_type = other RNA
ctttttgtacctgcattaa

SEQ ID NO: 232 - RNA, 19 nt, synthetic construct
  misc_feature 1..19: note = Synthetic: CD274-3542
  source 1..19: mol_type = other RNA
tttttgtacctgcattaat

SEQ ID NO: 233 - RNA, 19 nt, synthetic construct
  misc_feature 1..19: note = Synthetic: CD274-3545
  source 1..19: mol_type = other RNA
ttgtacctgcattaattta

SEQ ID NO: 234 - RNA, 19 nt, synthetic construct
  misc_feature 1..19: note = Synthetic: CD274-3546
  source 1..19: mol_type = other RNA
tgtacctgcattaatttaa

SEQ ID NO: 235 - RNA, 19 nt, synthetic construct
  misc_feature 1..19: note = Synthetic: CD274-3569
  source 1..19: mol_type = other RNA
atattcttatttattttgt

SEQ ID NO: 236 - RNA, 19 nt, synthetic construct
  misc_feature 1..19: note = Synthetic: CD274-3577
  source 1..19: mol_type = other RNA
atttattttgttacttggt

SEQ ID NO: 237 - RNA, 19 nt, synthetic construct
  misc_feature 1..19: note = Synthetic: CD274-3578
  source 1..19: mol_type = other RNA
tttattttgttacttggta

SEQ ID NO: 238 - RNA, 19 nt, synthetic construct
  misc_feature 1..19: note = Synthetic: CD274-3580
  source 1..19: mol_type = other RNA
tattttgttacttggtaca

SEQ ID NO: 239 - RNA, 19 nt, synthetic construct
  misc_feature 1..19: note = Synthetic: CD274-3604
  source 1..19: mol_type = other RNA
atgtccattttcttgttta

SEQ ID NO: 240 - RNA, 19 nt, synthetic construct
  misc_feature 1..19: note = Synthetic: CD274-3610
  source 1..19: mol_type = other RNA
attttcttgtttattttgt

SEQ ID NO: 241 - RNA, 19 nt, synthetic construct
  misc_feature 1..19: note = Synthetic: CD274-3622
  source 1..19: mol_type = other RNA
attttgtgtttaataaaat

SEQ ID NO: 242 - RNA, 19 nt, synthetic construct
  misc_feature 1..19: note = Synthetic: CD274-0088
  source 1..19: mol_type = other RNA
tcaaatatcctcatctttc

SEQ ID NO: 243 - RNA, 19 nt, synthetic construct
  misc_feature 1..19: note = Synthetic: CD274-0094
  source 1..19: mol_type = other RNA
tagacagcaaatatcctca

SEQ ID NO: 244 - skipped

SEQ ID NO: 245 - RNA, 19 nt, synthetic construct
  misc_feature 1..19: note = Synthetic: CD274-0097
  source 1..19: mol_type = other RNA
ttaaagacagcaaatatcc

SEQ ID NO: 246 - RNA, 19 nt, synthetic construct
  misc_feature 1..19: note = Synthetic: CD274-0098
  source 1..19: mol_type = other RNA
tataaagacagcaaatatc

SEQ ID NO: 247 - RNA, 19 nt, synthetic construct
  misc_feature 1..19: note = Synthetic: CD274-0100
  source 1..19: mol_type = other RNA
tatataaagacagcaaata

SEQ ID NO: 248 - RNA, 19 nt, synthetic construct
  misc_feature 1..19: note = Synthetic: CD274-0102
  source 1..19: mol_type = other RNA
tgaatataaagacagcaaa

SEQ ID NO: 249 - RNA, 19 nt, synthetic construct
  misc_feature 1..19: note = Synthetic: CD274-0167
  source 1..19: mol_type = other RNA
ttctaccacatataggtcc

SEQ ID NO: 250 - RNA, 19 nt, synthetic construct
  misc_feature 1..19: note = Synthetic: CD274-0193
  source 1..19: mol_type = other RNA
tattcaattgtcatattgc

SEQ ID NO: 251 - RNA, 19 nt, synthetic construct
  misc_feature 1..19: note = Synthetic: CD274-0194
  source 1..19: mol_type = other RNA
tcattcaattgtcatattg

SEQ ID NO: 252 - RNA, 19 nt, synthetic construct
  misc_feature 1..19: note = Synthetic: CD274-0197
  source 1..19: mol_type = other RNA
tttgcattcaattgtcata

SEQ ID NO: 253 - RNA, 19 nt, synthetic construct
  misc_feature 1..19: note = Synthetic: CD274-0200
  source 1..19: mol_type = other RNA
taatttgcattcaattgtc

SEQ ID NO: 254 - RNA, 19 nt, synthetic construct
  misc_feature 1..19: note = Synthetic: CD274-0204
  source 1..19: mol_type = other RNA
ttgggaatttgcattcaat

SEQ ID NO: 255 - RNA, 19 nt, synthetic construct
  misc_feature 1..19: note = Synthetic: CD274-0219
  source 1..19: mol_type = other RNA
ttaattgtttttctactgg

SEQ ID NO: 256 - RNA, 19 nt, synthetic construct
  misc_feature 1..19: note = Synthetic: CD274-0222
  source 1..19: mol_type = other RNA
tgtctaattgtttttctac

SEQ ID NO: 257 - RNA, 19 nt, synthetic construct
  misc_feature 1..19: note = Synthetic: CD274-0225
  source 1..19: mol_type = other RNA
tcaggtctaattgtttttc

SEQ ID NO: 258 - RNA, 19 nt, synthetic construct
  misc_feature 1..19: note = Synthetic: CD274-0268
  source 1..19: mol_type = other RNA
ttaatgttcttatcctcca

SEQ ID NO: 259 - RNA, 19 nt, synthetic construct
  misc_feature 1..19: note = Synthetic: CD274-0269
  source 1..19: mol_type = other RNA
tataatgttcttatcctcc

SEQ ID NO: 260 - RNA, 19 nt, synthetic construct
  misc_feature 1..19: note = Synthetic: CD274-0271
  source 1..19: mol_type = other RNA
tgaataatgttcttatcct

SEQ ID NO: 261 - RNA, 19 nt, synthetic construct
  misc_feature 1..19: note = Synthetic: CD274-0274
  source 1..19: mol_type = other RNA
tattgaataatgttcttat

SEQ ID NO: 262 - RNA, 19 nt, synthetic construct
  misc_feature 1..19: note = Synthetic: CD274-0275
  source 1..19: mol_type = other RNA
taattgaataatgttctta

SEQ ID NO: 263 - RNA, 19 nt, synthetic construct
  misc_feature 1..19: note = Synthetic: CD274-0277
  source 1..19: mol_type = other RNA
tcaaattgaataatgttct

SEQ ID NO: 264 - RNA, 19 nt, synthetic construct
  misc_feature 1..19: note = Synthetic: CD274-0282
  source 1..19: mol_type = other RNA
tatgcacaaattgaataat

SEQ ID NO: 265 - RNA, 19 nt, synthetic construct
  misc_feature 1..19: note = Synthetic: CD274-0283
  source 1..19: mol_type = other RNA
tcatgcacaaattgaataa

SEQ ID NO: 266 - RNA, 19 nt, synthetic construct
  misc_feature 1..19: note = Synthetic: CD274-0394
  source 1..19: mol_type = other RNA
tgcaatttcacatctgtga

SEQ ID NO: 267 - RNA, 19 nt, synthetic construct
  misc_feature 1..19: note = Synthetic: CD274-0399
  source 1..19: mol_type = other RNA
tatcctgcaatttcacatc

SEQ ID NO: 268 - RNA, 19 nt, synthetic construct
  misc_feature 1..19: note = Synthetic: CD274-0530
  source 1..19: mol_type = other RNA
ttcatgttcagaggtgact

SEQ ID NO: 269 - RNA, 19 nt, synthetic construct
  misc_feature 1..19: note = Synthetic: CD274-0531
  source 1..19: mol_type = other RNA
tttcatgttcagaggtgac

SEQ ID NO: 270 - RNA, 19 nt, synthetic construct
  misc_feature 1..19: note = Synthetic: CD274-0653
  source 1..19: mol_type = other RNA
tacattgaaaagcttctcc

SEQ ID NO: 271 - RNA, 19 nt, synthetic construct
  misc_feature 1..19: note = Synthetic: CD274-0673
  source 1..19: mol_type = other RNA
ttgattctcagtgtgctgg

SEQ ID NO: 272 - RNA, 19 nt, synthetic construct
  misc_feature 1..19: note = Synthetic: CD274-0693
  source 1..19: mol_type = other RNA
taatctcattagttgttgt

SEQ ID NO: 273 - RNA, 19 nt, synthetic construct
  misc_feature 1..19: note = Synthetic: CD274-0697
  source 1..19: mol_type = other RNA
tagaaaatctcattagttg

SEQ ID NO: 274 - RNA, 19 nt, synthetic construct
  misc_feature 1..19: note = Synthetic: CD274-0700
  source 1..19: mol_type = other RNA
tagtagaaaatctcattag

SEQ ID NO: 275 - RNA, 19 nt, synthetic construct
  misc_feature 1..19: note = Synthetic: CD274-0701
  source 1..19: mol_type = other RNA
tcagtagaaaatctcatta

SEQ ID NO: 276 - RNA, 19 nt, synthetic construct
  misc_feature 1..19: note = Synthetic: CD274-0743
  source 1..19: mol_type = other RNA
ttcagctgtatggttttcc

SEQ ID NO: 277 - RNA, 19 nt, synthetic construct
  misc_feature 1..19: note = Synthetic: CD274-0746
  source 1..19: mol_type = other RNA
taattcagctgtatggttt

SEQ ID NO: 278 - RNA, 19 nt, synthetic construct
  misc_feature 1..19: note = Synthetic: CD274-0095
  source 1..19: mol_type = other RNA
taagacagcaaatatcctc

SEQ ID NO: 279 - RNA, 19 nt, synthetic construct
  misc_feature 1..19: note = Synthetic: CD274-0099
  source 1..19: mol_type = other RNA
ttataaagacagcaaatat

SEQ ID NO: 280 - RNA, 19 nt, synthetic construct
  misc_feature 1..19: note = Synthetic: CD274-0103
  source 1..19: mol_type = other RNA
ttgaatataaagacagcaa

SEQ ID NO: 281 - RNA, 19 nt, synthetic construct
  misc_feature 1..19: note = Synthetic: CD274-0195
  source 1..19: mol_type = other RNA
tgcattcaattgtcatatt

SEQ ID NO: 282 - RNA, 19 nt, synthetic construct
  misc_feature 1..19: note = Synthetic: CD274-0196
  source 1..19: mol_type = other RNA
ttgcattcaattgtcatat

SEQ ID NO: 283 - RNA, 19 nt, synthetic construct
  misc_feature 1..19: note = Synthetic: CD274-0198
  source 1..19: mol_type = other RNA
ttttgcattcaattgtcat

SEQ ID NO: 284 - RNA, 19 nt, synthetic construct
  misc_feature 1..19: note = Synthetic: CD274-0199
  source 1..19: mol_type = other RNA
tatttgcattcaattgtca

SEQ ID NO: 285 - RNA, 19 nt, synthetic construct
  misc_feature 1..19: note = Synthetic: CD274-0201
  source 1..19: mol_type = other RNA
tgaatttgcattcaattgt

SEQ ID NO: 286 - RNA, 19 nt, synthetic construct
  misc_feature 1..19: note = Synthetic: CD274-0202
  source 1..19: mol_type = other RNA
tggaatttgcattcaattg

SEQ ID NO: 287 - RNA, 19 nt, synthetic construct
  misc_feature 1..19: note = Synthetic: CD274-0207
  source 1..19: mol_type = other RNA
ttactgggaatttgcattc

SEQ ID NO: 288 - RNA, 19 nt, synthetic construct
  misc_feature 1..19: note = Synthetic: CD274-0221
  source 1..19: mol_type = other RNA
ttctaattgtttttctact

SEQ ID NO: 289 - RNA, 19 nt, synthetic construct
  misc_feature 1..19: note = Synthetic: CD274-0245
  source 1..19: mol_type = other RNA
tcaatagacaattagtgca

SEQ ID NO: 290 - RNA, 19 nt, synthetic construct
  misc_feature 1..19: note = Synthetic: CD274-0248
  source 1..19: mol_type = other RNA
ttcccaatagacaattagt

SEQ ID NO: 291 - RNA, 19 nt, synthetic construct
  misc_feature 1..19: note = Synthetic: CD274-0249
  source 1..19: mol_type = other RNA
tttcccaatagacaattag

SEQ ID NO: 292 - RNA, 19 nt, synthetic construct
  misc_feature 1..19: note = Synthetic: CD274-0265
  source 1..19: mol_type = other RNA
ttgttcttatcctccattt

SEQ ID NO: 293 - RNA, 19 nt, synthetic construct
  misc_feature 1..19: note = Synthetic: CD274-0266
  source 1..19: mol_type = other RNA
tatgttcttatcctccatt

SEQ ID NO: 294 - RNA, 19 nt, synthetic construct
  misc_feature 1..19: note = Synthetic: CD274-0267
  source 1..19: mol_type = other RNA
taatgttcttatcctccat

SEQ ID NO: 295 - RNA, 19 nt, synthetic construct
  misc_feature 1..19: note = Synthetic: CD274-0270
  source 1..19: mol_type = other RNA
taataatgttcttatcctc

SEQ ID NO: 296 - RNA, 19 nt, synthetic construct
  misc_feature 1..19: note = Synthetic: CD274-0272
  source 1..19: mol_type = other RNA
ttgaataatgttcttatcc

SEQ ID NO: 297 - RNA, 19 nt, synthetic construct
  misc_feature 1..19: note = Synthetic: CD274-0273
  source 1..19: mol_type = other RNA
tttgaataatgttcttatc

SEQ ID NO: 298 - RNA, 19 nt, synthetic construct
  misc_feature 1..19: note = Synthetic: CD274-0276
  source 1..19: mol_type = other RNA
taaattgaataatgttctt

SEQ ID NO: 299 - RNA, 19 nt, synthetic construct
  misc_feature 1..19: note = Synthetic: CD274-0278
  source 1..19: mol_type = other RNA
tacaaattgaataatgttc

SEQ ID NO: 300 - RNA, 19 nt, synthetic construct
  misc_feature 1..19: note = Synthetic: CD274-0279
  source 1..19: mol_type = other RNA
tcacaaattgaataatgtt

SEQ ID NO: 301 - RNA, 19 nt, synthetic construct
  misc_feature 1..19: note = Synthetic: CD274-0280
  source 1..19: mol_type = other RNA
tgcacaaattgaataatgt

SEQ ID NO: 302 - RNA, 19 nt, synthetic construct
  misc_feature 1..19: note = Synthetic: CD274-0281
  source 1..19: mol_type = other RNA
ttgcacaaattgaataatg

SEQ ID NO: 303 - RNA, 19 nt, synthetic construct
  misc_feature 1..19: note = Synthetic: CD274-0285
  source 1..19: mol_type = other RNA
ttccatgcacaaattgaat

SEQ ID NO: 304 - RNA, 19 nt, synthetic construct
  misc_feature 1..19: note = Synthetic: CD274-0303
  source 1..19: mol_type = other RNA
taaccttcaggtcttcctc

SEQ ID NO: 305 - RNA, 19 nt, synthetic construct
  misc_feature 1..19: note = Synthetic: CD274-0305
  source 1..19: mol_type = other RNA
ttgaaccttcaggtcttcc

SEQ ID NO: 306 - RNA, 19 nt, synthetic construct
  misc_feature 1..19: note = Synthetic: CD274-0308
  source 1..19: mol_type = other RNA
ttgctgaaccttcaggtct

SEQ ID NO: 307 - RNA, 19 nt, synthetic construct
  misc_feature 1..19: note = Synthetic: CD274-0309
  source 1..19: mol_type = other RNA
tatgctgaaccttcaggtc

SEQ ID NO: 308 - RNA, 19 nt, synthetic construct
  misc_feature 1..19: note = Synthetic: CD274-0310
  source 1..19: mol_type = other RNA
ttatgctgaaccttcaggt

SEQ ID NO: 309 - RNA, 19 nt, synthetic construct
  misc_feature 1..19: note = Synthetic: CD274-0312
  source 1..19: mol_type = other RNA
tactatgctgaaccttcag

SEQ ID NO: 310 - RNA, 19 nt, synthetic construct
  misc_feature 1..19: note = Synthetic: CD274-0313
  source 1..19: mol_type = other RNA
ttactatgctgaaccttca

SEQ ID NO: 311 - RNA, 19 nt, synthetic construct
  misc_feature 1..19: note = Synthetic: CD274-0392
  source 1..19: mol_type = other RNA
taatttcacatctgtgatc

SEQ ID NO: 312 - RNA, 19 nt, synthetic construct
  misc_feature 1..19: note = Synthetic: CD274-0395
  source 1..19: mol_type = other RNA
ttgcaatttcacatctgtg

SEQ ID NO: 313 - RNA, 19 nt, synthetic construct
  misc_feature 1..19: note = Synthetic: CD274-0398
  source 1..19: mol_type = other RNA
ttcctgcaatttcacatct

SEQ ID NO: 314 - RNA, 19 nt, synthetic construct
  misc_feature 1..19: note = Synthetic: CD274-0497
  source 1..19: mol_type = other RNA
tattctttggttgattttg

SEQ ID NO: 315 - RNA, 19 nt, synthetic construct
  misc_feature 1..19: note = Synthetic: CD274-0499
  source 1..19: mol_type = other RNA
taaattctttggttgattt

SEQ ID NO: 316 - RNA, 19 nt, synthetic construct
  misc_feature 1..19: note = Synthetic: CD274-0500
  source 1..19: mol_type = other RNA
taaaattctttggttgatt

SEQ ID NO: 317 - RNA, 19 nt, synthetic construct
  misc_feature 1..19: note = Synthetic: CD274-0501
  source 1..19: mol_type = other RNA
tcaaaattctttggttgat

SEQ ID NO: 318 - RNA, 19 nt, synthetic construct
  misc_feature 1..19: note = Synthetic: CD274-0502
  source 1..19: mol_type = other RNA
tccaaaattctttggttga

SEQ ID NO: 319 - RNA, 19 nt, synthetic construct
  misc_feature 1..19: note = Synthetic: CD274-0504
  source 1..19: mol_type = other RNA
taaccaaaattctttggtt

SEQ ID NO: 320 - RNA, 19 nt, synthetic construct
  misc_feature 1..19: note = Synthetic: CD274-0505
  source 1..19: mol_type = other RNA
tcaaccaaaattctttggt

SEQ ID NO: 321 - RNA, 19 nt, synthetic construct
  misc_feature 1..19: note = Synthetic: CD274-0506
  source 1..19: mol_type = other RNA
tacaaccaaaattctttgg

SEQ ID NO: 322 - RNA, 19 nt, synthetic construct
  misc_feature 1..19: note = Synthetic: CD274-0507
  source 1..19: mol_type = other RNA
tcacaaccaaaattctttg

SEQ ID NO: 323 - RNA, 19 nt, synthetic construct
  misc_feature 1..19: note = Synthetic: CD274-0509
  source 1..19: mol_type = other RNA
ttccacaaccaaaattctt

SEQ ID NO: 324 - RNA, 19 nt, synthetic construct
  misc_feature 1..19: note = Synthetic: CD274-0510
  source 1..19: mol_type = other RNA
tatccacaaccaaaattct

SEQ ID NO: 325 - RNA, 19 nt, synthetic construct
  misc_feature 1..19: note = Synthetic: CD274-0511
  source 1..19: mol_type = other RNA
tgatccacaaccaaaattc

SEQ ID NO: 326 - RNA, 19 nt, synthetic construct
  misc_feature 1..19: note = Synthetic: CD274-0513
  source 1..19: mol_type = other RNA
ttggatccacaaccaaaat

SEQ ID NO: 327 - RNA, 19 nt, synthetic construct
  misc_feature 1..19: note = Synthetic: CD274-0535
  source 1..19: mol_type = other RNA
ttcagttcatgttcagagg

SEQ ID NO: 328 - RNA, 19 nt, synthetic construct
  misc_feature 1..19: note = Synthetic: CD274-0537
  source 1..19: mol_type = other RNA
ttgtcagttcatgttcaga

SEQ ID NO: 329 - RNA, 19 nt, synthetic construct
  misc_feature 1..19: note = Synthetic: CD274-0542
  source 1..19: mol_type = other RNA
ttgacatgtcagttcatgt

SEQ ID NO: 330 - RNA, 19 nt, synthetic construct
  misc_feature 1..19: note = Synthetic: CD274-0583
  source 1..19: mol_type = other RNA
ttgcttgtccagatgactt

SEQ ID NO: 331 - RNA, 19 nt, synthetic construct
  misc_feature 1..19: note = Synthetic: CD274-0594
  source 1..19: mol_type = other RNA
tttgatggtcactgcttgt

SEQ ID NO: 332 - RNA, 19 nt, synthetic construct
  misc_feature 1..19: note = Synthetic: CD274-0601
  source 1..19: mol_type = other RNA
ttcaggacttgatggtcac

SEQ ID NO: 333 - RNA, 19 nt, synthetic construct
  misc_feature 1..19: note = Synthetic: CD274-0654
  source 1..19: mol_type = other RNA
tcacattgaaaagcttctc

SEQ ID NO: 334 - RNA, 19 nt, synthetic construct
  misc_feature 1..19: note = Synthetic: CD274-0655
  source 1..19: mol_type = other RNA
ttcacattgaaaagcttct

SEQ ID NO: 335 - RNA, 19 nt, synthetic construct
  misc_feature 1..19: note = Synthetic: CD274-0656
  source 1..19: mol_type = other RNA
tgtcacattgaaaagcttc

SEQ ID NO: 336 - RNA, 19 nt, synthetic construct
  misc_feature 1..19: note = Synthetic: CD274-0658
  source 1..19: mol_type = other RNA
ttggtcacattgaaaagct

SEQ ID NO: 337 - RNA, 19 nt, synthetic construct
  misc_feature 1..19: note = Synthetic: CD274-0661
  source 1..19: mol_type = other RNA
ttgctggtcacattgaaaa

SEQ ID NO: 338 - RNA, 19 nt, synthetic construct
  misc_feature 1..19: note = Synthetic: CD274-0667
  source 1..19: mol_type = other RNA
ttcagtgtgctggtcacat

SEQ ID NO: 339 - RNA, 19 nt, synthetic construct
  misc_feature 1..19: note = Synthetic: CD274-0676
  source 1..19: mol_type = other RNA
ttgttgattctcagtgtgc

SEQ ID NO: 340 - RNA, 19 nt, synthetic construct
  misc_feature 1..19: note = Synthetic: CD274-0679
  source 1..19: mol_type = other RNA
tttgtgttgattctcagtg

SEQ ID NO: 341 - RNA, 19 nt, synthetic construct
  misc_feature 1..19: note = Synthetic: CD274-0681
  source 1..19: mol_type = other RNA
ttgttgtgttgattctcag

SEQ ID NO: 342 - RNA, 19 nt, synthetic construct
  misc_feature 1..19: note = Synthetic: CD274-0685
  source 1..19: mol_type = other RNA
ttagttgttgtgttgattc

SEQ ID NO: 343 - RNA, 19 nt, synthetic construct
  misc_feature 1..19: note = Synthetic: CD274-0692
  source 1..19: mol_type = other RNA
tatctcattagttgttgtg

SEQ ID NO: 344 - RNA, 19 nt, synthetic construct
  misc_feature 1..19: note = Synthetic: CD274-0695
  source 1..19: mol_type = other RNA
taaaatctcattagttgtt

SEQ ID NO: 345 - RNA, 19 nt, synthetic construct
  misc_feature 1..19: note = Synthetic: CD274-0696
  source 1..19: mol_type = other RNA
tgaaaatctcattagttgt

SEQ ID NO: 346 - RNA, 19 nt, synthetic construct
  misc_feature 1..19: note = Synthetic: CD274-0698
  source 1..19: mol_type = other RNA
ttagaaaatctcattagtt

SEQ ID NO: 347 - RNA, 19 nt, synthetic construct
  misc_feature 1..19: note = Synthetic: CD274-0703
  source 1..19: mol_type = other RNA
ttgcagtagaaaatctcat

SEQ ID NO: 348 - RNA, 19 nt, synthetic construct
  misc_feature 1..19: note = Synthetic: CD274-0709
  source 1..19: mol_type = other RNA
ttaaaagtgcagtagaaaa

SEQ ID NO: 349 - RNA, 19 nt, synthetic construct
  misc_feature 1..19: note = Synthetic: CD274-0745
  source 1..19: mol_type = other RNA
tattcagctgtatggtttt

SEQ ID NO: 350 - RNA, 19 nt, synthetic construct
  misc_feature 1..19: note = Synthetic: CD274-0749
  source 1..19: mol_type = other RNA
taccaattcagctgtatgg

SEQ ID NO: 351 - RNA, 19 nt, synthetic construct
  misc_feature 1..19: note = Synthetic: CD274-0752
  source 1..19: mol_type = other RNA
tatgaccaattcagctgta

SEQ ID NO: 352 - RNA, 19 nt, synthetic construct
  misc_feature 1..19: note = Synthetic: CD274-0800
  source 1..19: mol_type = other RNA
taccaagtgagtcctttca

SEQ ID NO: 353 - RNA, 19 nt, synthetic construct
  misc_feature 1..19: note = Synthetic: CD274-0804
  source 1..19: mol_type = other RNA
taattaccaagtgagtcct

SEQ ID NO: 354 - RNA, 19 nt, synthetic construct
  misc_feature 1..19: note = Synthetic: CD274-0847
  source 1..19: mol_type = other RNA
ttgaatgtcagtgctacac

SEQ ID NO: 355 - RNA, 19 nt, synthetic construct
  misc_feature 1..19: note = Synthetic: CD274-0852
  source 1..19: mol_type = other RNA
tgaagatgaatgtcagtgc

SEQ ID NO: 356 - RNA, 19 nt, synthetic construct
  misc_feature 1..19: note = Synthetic: CD274-0889
  source 1..19: mol_type = other RNA
tattttttcacatccatca

SEQ ID NO: 357 - RNA, 19 nt, synthetic construct
  misc_feature 1..19: note = Synthetic: CD274-1172
  source 1..19: mol_type = other RNA
ttgaaagtatcaaggtctc

SEQ ID NO: 358 - RNA, 19 nt, synthetic construct
  misc_feature 1..19: note = Synthetic: CD274-1173
  source 1..19: mol_type = other RNA
tttgaaagtatcaaggtct

SEQ ID NO: 359 - RNA, 19 nt, synthetic construct
  misc_feature 1..19: note = Synthetic: CD274-1174
  source 1..19: mol_type = other RNA
ttttgaaagtatcaaggtc

SEQ ID NO: 360 - RNA, 19 nt, synthetic construct
  misc_feature 1..19: note = Synthetic: CD274-1176
  source 1..19: mol_type = other RNA
tcatttgaaagtatcaagg

SEQ ID NO: 361 - RNA, 19 nt, synthetic construct
  misc_feature 1..19: note = Synthetic: CD274-1178
  source 1..19: mol_type = other RNA
tggcatttgaaagtatcaa

SEQ ID NO: 362 - RNA, 19 nt, synthetic construct
  misc_feature 1..19: note = Synthetic: CD274-1227
  source 1..19: mol_type = other RNA
ttgttcagaagtatccttt

SEQ ID NO: 363 - RNA, 19 nt, synthetic construct
  misc_feature 1..19: note = Synthetic: CD274-1231
  source 1..19: mol_type = other RNA
ttccttgttcagaagtatc

SEQ ID NO: 364 - RNA, 19 nt, synthetic construct
  misc_feature 1..19: note = Synthetic: CD274-1423
  source 1..19: mol_type = other RNA
tacagactcaaaataaata

SEQ ID NO: 365 - RNA, 19 nt, synthetic construct
  misc_feature 1..19: note = Synthetic: CD274-1425
  source 1..19: mol_type = other RNA
ttcacagactcaaaataaa

SEQ ID NO: 366 - RNA, 19 nt, synthetic construct
  misc_feature 1..19: note = Synthetic: CD274-1459
  source 1..19: mol_type = other RNA
ttcattcacaaccacactc

SEQ ID NO: 367 - RNA, 19 nt, synthetic construct
  misc_feature 1..19: note = Synthetic: CD274-1460
  source 1..19: mol_type = other RNA
tatcattcacaaccacact

SEQ ID NO: 368 - RNA, 19 nt, synthetic construct
  misc_feature 1..19: note = Synthetic: CD274-1461
  source 1..19: mol_type = other RNA
taatcattcacaaccacac

SEQ ID NO: 369 - RNA, 19 nt, synthetic construct
  misc_feature 1..19: note = Synthetic: CD274-1462
  source 1..19: mol_type = other RNA
taaatcattcacaaccaca

SEQ ID NO: 370 - RNA, 19 nt, synthetic construct
  misc_feature 1..19: note = Synthetic: CD274-1463
  source 1..19: mol_type = other RNA
tgaaatcattcacaaccac

SEQ ID NO: 371 - RNA, 19 nt, synthetic construct
  misc_feature 1..19: note = Synthetic: CD274-1464
  source 1..19: mol_type = other RNA
tagaaatcattcacaacca

SEQ ID NO: 372 - RNA, 19 nt, synthetic construct
  misc_feature 1..19: note = Synthetic: CD274-1465
  source 1..19: mol_type = other RNA
taagaaatcattcacaacc

SEQ ID NO: 373 - RNA, 19 nt, synthetic construct
  misc_feature 1..19: note = Synthetic: CD274-1467
  source 1..19: mol_type = other RNA
taaaagaaatcattcacaa

SEQ ID NO: 374 - RNA, 19 nt, synthetic construct
  misc_feature 1..19: note = Synthetic: CD274-1469
  source 1..19: mol_type = other RNA
ttcaaaagaaatcattcac

SEQ ID NO: 375 - RNA, 19 nt, synthetic construct
  misc_feature 1..19: note = Synthetic: CD274-1470
  source 1..19: mol_type = other RNA
tttcaaaagaaatcattca

SEQ ID NO: 376 - RNA, 19 nt, synthetic construct
  misc_feature 1..19: note = Synthetic: CD274-1473
  source 1..19: mol_type = other RNA
tatcttcaaaagaaatcat

SEQ ID NO: 377 - RNA, 19 nt, synthetic construct
  misc_feature 1..19: note = Synthetic: CD274-1474
  source 1..19: mol_type = other RNA
ttatcttcaaaagaaatca

SEQ ID NO: 378 - RNA, 19 nt, synthetic construct
  misc_feature 1..19: note = Synthetic: CD274-1481
  source 1..19: mol_type = other RNA
ttacaatatatcttcaaaa

SEQ ID NO: 379 - RNA, 19 nt, synthetic construct
  misc_feature 1..19: note = Synthetic: CD274-1484
  source 1..19: mol_type = other RNA
ttactacaatatatcttca

SEQ ID NO: 380 - RNA, 19 nt, synthetic construct
  misc_feature 1..19: note = Synthetic: CD274-1486
  source 1..19: mol_type = other RNA
ttctactacaatatatctt

SEQ ID NO: 381 - RNA, 19 nt, synthetic construct
  misc_feature 1..19: note = Synthetic: CD274-1499
  source 1..19: mol_type = other RNA
tcaaaattgtaacatctac

SEQ ID NO: 382 - RNA, 19 nt, synthetic construct
  misc_feature 1..19: note = Synthetic: CD274-1500
  source 1..19: mol_type = other RNA
tacaaaattgtaacatcta

SEQ ID NO: 383 - RNA, 19 nt, synthetic construct
  misc_feature 1..19: note = Synthetic: CD274-1541
  source 1..19: mol_type = other RNA
ttagatgtgagcaaatcat

SEQ ID NO: 384 - RNA, 19 nt, synthetic construct
  misc_feature 1..19: note = Synthetic: CD274-1562
  source 1..19: mol_type = other RNA
ttacaaatactccatgttt

SEQ ID NO: 385 - RNA, 19 nt, synthetic construct
  misc_feature 1..19: note = Synthetic: CD274-1606
  source 1..19: mol_type = other RNA
ttgcttccaatgtatactt

SEQ ID NO: 386 - RNA, 19 nt, synthetic construct
  misc_feature 1..19: note = Synthetic: CD274-1607
  source 1..19: mol_type = other RNA
tatgcttccaatgtatact

SEQ ID NO: 387 - RNA, 19 nt, synthetic construct
  misc_feature 1..19: note = Synthetic: CD274-1649
  source 1..19: mol_type = other RNA
ttaaataaaggtgacatcc

SEQ ID NO: 388 - RNA, 19 nt, synthetic construct
  misc_feature 1..19: note = Synthetic: CD274-1728
  source 1..19: mol_type = other RNA
ttgatatttaaatggaaca

SEQ ID NO: 389 - RNA, 19 nt, synthetic construct
  misc_feature 1..19: note = Synthetic: CD274-1794
  source 1..19: mol_type = other RNA
ttcacaacagggtggttac

SEQ ID NO: 390 - RNA, 19 nt, synthetic construct
  misc_feature 1..19: note = Synthetic: CD274-1795
  source 1..19: mol_type = other RNA
tatcacaacagggtggtta

SEQ ID NO: 391 - RNA, 19 nt, synthetic construct
  misc_feature 1..19: note = Synthetic: CD274-1806
  source 1..19: mol_type = other RNA
ttaatagtggttatcacaa

SEQ ID NO: 392 - RNA, 19 nt, synthetic construct
  misc_feature 1..19: note = Synthetic: CD274-1807
  source 1..19: mol_type = other RNA
tataatagtggttatcaca

SEQ ID NO: 393 - RNA, 19 nt, synthetic construct
  misc_feature 1..19: note = Synthetic: CD274-1808
  source 1..19: mol_type = other RNA
taataatagtggttatcac

SEQ ID NO: 394 - RNA, 19 nt, synthetic construct
  misc_feature 1..19: note = Synthetic: CD274-1809
  source 1..19: mol_type = other RNA
taaataatagtggttatca

SEQ ID NO: 395 - RNA, 19 nt, synthetic construct
  misc_feature 1..19: note = Synthetic: CD274-1810
  source 1..19: mol_type = other RNA
taaaataatagtggttatc

SEQ ID NO: 396 - RNA, 19 nt, synthetic construct
  misc_feature 1..19: note = Synthetic: CD274-1811
  source 1..19: mol_type = other RNA
ttaaaataatagtggttat

SEQ ID NO: 397 - RNA, 19 nt, synthetic construct
  misc_feature 1..19: note = Synthetic: CD274-1812
  source 1..19: mol_type = other RNA
tgtaaaataatagtggtta

SEQ ID NO: 398 - RNA, 19 nt, synthetic construct
  misc_feature 1..19: note = Synthetic: CD274-1906
  source 1..19: mol_type = other RNA
ttattataaaaggacagtg

SEQ ID NO: 399 - RNA, 19 nt, synthetic construct
  misc_feature 1..19: note = Synthetic: CD274-1907
  source 1..19: mol_type = other RNA
tgtattataaaaggacagt

SEQ ID NO: 400 - RNA, 19 nt, synthetic construct
  misc_feature 1..19: note = Synthetic: CD274-1908
  source 1..19: mol_type = other RNA
ttgtattataaaaggacag

SEQ ID NO: 401 - RNA, 19 nt, synthetic construct
  misc_feature 1..19: note = Synthetic: CD274-1909
  source 1..19: mol_type = other RNA
tttgtattataaaaggaca

SEQ ID NO: 402 - RNA, 19 nt, synthetic construct
  misc_feature 1..19: note = Synthetic: CD274-1910
  source 1..19: mol_type = other RNA
tattgtattataaaaggac

SEQ ID NO: 403 - RNA, 19 nt, synthetic construct
  misc_feature 1..19: note = Synthetic: CD274-1913
  source 1..19: mol_type = other RNA
ttaaattgtattataaaag

SEQ ID NO: 404 - RNA, 19 nt, synthetic construct
  misc_feature 1..19: note = Synthetic: CD274-1915
  source 1..19: mol_type = other RNA
ttgtaaattgtattataaa

SEQ ID NO: 405 - RNA, 19 nt, synthetic construct
  misc_feature 1..19: note = Synthetic: CD274-1919
  source 1..19: mol_type = other RNA
ttagctgtaaattgtatta

SEQ ID NO: 406 - RNA, 19 nt, synthetic construct
  misc_feature 1..19: note = Synthetic: CD274-1931
  source 1..19: mol_type = other RNA
ttaaagtaaaatatagctg

SEQ ID NO: 407 - RNA, 19 nt, synthetic construct
  misc_feature 1..19: note = Synthetic: CD274-1935
  source 1..19: mol_type = other RNA
ttgcttaaagtaaaatata

SEQ ID NO: 408 - RNA, 19 nt, synthetic construct
  misc_feature 1..19: note = Synthetic: CD274-1937
  source 1..19: mol_type = other RNA
tattgcttaaagtaaaata

SEQ ID NO: 409 - RNA, 19 nt, synthetic construct
  misc_feature 1..19: note = Synthetic: CD274-2014
  source 1..19: mol_type = other RNA
ttcacatctgtagattcaa

SEQ ID NO: 410 - RNA, 19 nt, synthetic construct
  misc_feature 1..19: note = Synthetic: CD274-2088
  source 1..19: mol_type = other RNA
tattgtaataatacatttt

SEQ ID NO: 411 - RNA, 19 nt, synthetic construct
  misc_feature 1..19: note = Synthetic: CD274-2221
  source 1..19: mol_type = other RNA
ttgaaaattactctgatta

SEQ ID NO: 412 - RNA, 19 nt, synthetic construct
  misc_feature 1..19: note = Synthetic: CD274-2225
  source 1..19: mol_type = other RNA
ttaaatgaaaattactctg

SEQ ID NO: 413 - RNA, 19 nt, synthetic construct
  misc_feature 1..19: note = Synthetic: CD274-2227
  source 1..19: mol_type = other RNA
ttgtaaatgaaaattactc

SEQ ID NO: 414 - RNA, 19 nt, synthetic construct
  misc_feature 1..19: note = Synthetic: CD274-2228
  source 1..19: mol_type = other RNA
tttgtaaatgaaaattact

SEQ ID NO: 415 - RNA, 19 nt, synthetic construct
  misc_feature 1..19: note = Synthetic: CD274-2229
  source 1..19: mol_type = other RNA
ttttgtaaatgaaaattac

SEQ ID NO: 416 - RNA, 19 nt, synthetic construct
  misc_feature 1..19: note = Synthetic: CD274-2231
  source 1..19: mol_type = other RNA
ttctttgtaaatgaaaatt

SEQ ID NO: 417 - RNA, 19 nt, synthetic construct
  misc_feature 1..19: note = Synthetic: CD274-2233
  source 1..19: mol_type = other RNA
ttctctttgtaaatgaaaa

SEQ ID NO: 418 - RNA, 19 nt, synthetic construct
  misc_feature 1..19: note = Synthetic: CD274-2263
  source 1..19: mol_type = other RNA
ttatttttcagggttattt

SEQ ID NO: 419 - RNA, 19 nt, synthetic construct
  misc_feature 1..19: note = Synthetic: CD274-2266
  source 1..19: mol_type = other RNA
ttgttatttttcagggtta

SEQ ID NO: 420 - RNA, 19 nt, synthetic construct
  misc_feature 1..19: note = Synthetic: CD274-2333
  source 1..19: mol_type = other RNA
taacaagcattagattata

SEQ ID NO: 421 - RNA, 19 nt, synthetic construct
  misc_feature 1..19: note = Synthetic: CD274-2335
  source 1..19: mol_type = other RNA
ttaaacaagcattagatta

SEQ ID NO: 422 - RNA, 19 nt, synthetic construct
  misc_feature 1..19: note = Synthetic: CD274-2337
  source 1..19: mol_type = other RNA
ttataaacaagcattagat

SEQ ID NO: 423 - RNA, 19 nt, synthetic construct
  misc_feature 1..19: note = Synthetic: CD274-2338
  source 1..19: mol_type = other RNA
tatataaacaagcattaga

SEQ ID NO: 424 - RNA, 19 nt, synthetic construct
  misc_feature 1..19: note = Synthetic: CD274-2339
  source 1..19: mol_type = other RNA
ttatataaacaagcattag

SEQ ID NO: 425 - RNA, 19 nt, synthetic construct
  misc_feature 1..19: note = Synthetic: CD274-2341
  source 1..19: mol_type = other RNA
tactatataaacaagcatt

SEQ ID NO: 426 - RNA, 19 nt, synthetic construct
  misc_feature 1..19: note = Synthetic: CD274-2343
  source 1..19: mol_type = other RNA
tacactatataaacaagca

SEQ ID NO: 427 - RNA, 19 nt, synthetic construct
  misc_feature 1..19: note = Synthetic: CD274-2362
  source 1..19: mol_type = other RNA
taactgttaaacaatacca

SEQ ID NO: 428 - RNA, 19 nt, synthetic construct
  misc_feature 1..19: note = Synthetic: CD274-2363
  source 1..19: mol_type = other RNA
tgaactgttaaacaatacc

SEQ ID NO: 429 - RNA, 19 nt, synthetic construct
  misc_feature 1..19: note = Synthetic: CD274-2407
  source 1..19: mol_type = other RNA
taaggtatgaatttaaaat

SEQ ID NO: 430 - RNA, 19 nt, synthetic construct
  misc_feature 1..19: note = Synthetic: CD274-2556
  source 1..19: mol_type = other RNA
tacatttccaaatgtagac

SEQ ID NO: 431 - RNA, 19 nt, synthetic construct
  misc_feature 1..19: note = Synthetic: CD274-2557
  source 1..19: mol_type = other RNA
ttacatttccaaatgtaga

SEQ ID NO: 432 - RNA, 19 nt, synthetic construct
  misc_feature 1..19: note = Synthetic: CD274-2561
  source 1..19: mol_type = other RNA
taacatacatttccaaatg

SEQ ID NO: 433 - RNA, 19 nt, synthetic construct
  misc_feature 1..19: note = Synthetic: CD274-2562
  source 1..19: mol_type = other RNA
ttaacatacatttccaaat

SEQ ID NO: 434 - RNA, 19 nt, synthetic construct
  misc_feature 1..19: note = Synthetic: CD274-2563
  source 1..19: mol_type = other RNA
tttaacatacatttccaaa

SEQ ID NO: 435 - RNA, 19 nt, synthetic construct
  misc_feature 1..19: note = Synthetic: CD274-2565
  source 1..19: mol_type = other RNA
tttttaacatacatttcca

SEQ ID NO: 436 - RNA, 19 nt, synthetic construct
  misc_feature 1..19: note = Synthetic: CD274-2568
  source 1..19: mol_type = other RNA
ttgcttttaacatacattt

SEQ ID NO: 437 - RNA, 19 nt, synthetic construct
  misc_feature 1..19: note = Synthetic: CD274-2634
  source 1..19: mol_type = other RNA
taaaatagcaaagtacaca

SEQ ID NO: 438 - RNA, 19 nt, synthetic construct
  misc_feature 1..19: note = Synthetic: CD274-2636
  source 1..19: mol_type = other RNA
ttaaaaatagcaaagtaca

SEQ ID NO: 439 - RNA, 19 nt, synthetic construct
  misc_feature 1..19: note = Synthetic: CD274-2637
  source 1..19: mol_type = other RNA
tataaaaatagcaaagtac

SEQ ID NO: 440 - RNA, 19 nt, synthetic construct
  misc_feature 1..19: note = Synthetic: CD274-2640
  source 1..19: mol_type = other RNA
ttaaataaaaatagcaaag

SEQ ID NO: 441 - RNA, 19 nt, synthetic construct
  misc_feature 1..19: note = Synthetic: CD274-2673
  source 1..19: mol_type = other RNA
tttcattccatctgctata

SEQ ID NO: 442 - RNA, 19 nt, synthetic construct
  misc_feature 1..19: note = Synthetic: CD274-2678
  source 1..19: mol_type = other RNA
ttcaaattcattccatctg

SEQ ID NO: 443 - RNA, 19 nt, synthetic construct
  misc_feature 1..19: note = Synthetic: CD274-2679
  source 1..19: mol_type = other RNA
tttcaaattcattccatct

SEQ ID NO: 444 - RNA, 19 nt, synthetic construct
  misc_feature 1..19: note = Synthetic: CD274-2801
  source 1..19: mol_type = other RNA
ttggttgtctaaatgtata

SEQ ID NO: 445 - RNA, 19 nt, synthetic construct
  misc_feature 1..19: note = Synthetic: CD274-2815
  source 1..19: mol_type = other RNA
ttacttaacaaatggtggt

SEQ ID NO: 446 - RNA, 19 nt, synthetic construct
  misc_feature 1..19: note = Synthetic: CD274-2819
  source 1..19: mol_type = other RNA
tcaaatacttaacaaatgg

SEQ ID NO: 447 - RNA, 19 nt, synthetic construct
  misc_feature 1..19: note = Synthetic: CD274-2924
  source 1..19: mol_type = other RNA
ttaataataagattgcttt

SEQ ID NO: 448 - RNA, 19 nt, synthetic construct
  misc_feature 1..19: note = Synthetic: CD274-2935
  source 1..19: mol_type = other RNA
ttcatacagagttaataat

SEQ ID NO: 449 - RNA, 19 nt, synthetic construct
  misc_feature 1..19: note = Synthetic: CD274-2936
  source 1..19: mol_type = other RNA
tgtcatacagagttaataa

SEQ ID NO: 450 - RNA, 19 nt, synthetic construct
  misc_feature 1..19: note = Synthetic: CD274-2937
  source 1..19: mol_type = other RNA
ttgtcatacagagttaata

SEQ ID NO: 451 - RNA, 19 nt, synthetic construct
  misc_feature 1..19: note = Synthetic: CD274-2939
  source 1..19: mol_type = other RNA
ttctgtcatacagagttaa

SEQ ID NO: 452 - RNA, 19 nt, synthetic construct
  misc_feature 1..19: note = Synthetic: CD274-2994
  source 1..19: mol_type = other RNA
ttcaaagtgaagtttatac

SEQ ID NO: 453 - RNA, 19 nt, synthetic construct
  misc_feature 1..19: note = Synthetic: CD274-3015
  source 1..19: mol_type = other RNA
ttgtgattttgcaagtaca

SEQ ID NO: 454 - RNA, 19 nt, synthetic construct
  misc_feature 1..19: note = Synthetic: CD274-3019
  source 1..19: mol_type = other RNA
taaaatgtgattttgcaag

SEQ ID NO: 455 - RNA, 19 nt, synthetic construct
  misc_feature 1..19: note = Synthetic: CD274-3094
  source 1..19: mol_type = other RNA
ttcaagcacaacgaatgag

SEQ ID NO: 456 - RNA, 19 nt, synthetic construct
  misc_feature 1..19: note = Synthetic: CD274-3095
  source 1..19: mol_type = other RNA
tttcaagcacaacgaatga

SEQ ID NO: 457 - RNA, 19 nt, synthetic construct
  misc_feature 1..19: note = Synthetic: CD274-3305
  source 1..19: mol_type = other RNA
ttacaaacagataacacaa

SEQ ID NO: 458 - RNA, 19 nt, synthetic construct
  misc_feature 1..19: note = Synthetic: CD274-3306
  source 1..19: mol_type = other RNA
tgtacaaacagataacaca

SEQ ID NO: 459 - RNA, 19 nt, synthetic construct
  misc_feature 1..19: note = Synthetic: CD274-3307
  source 1..19: mol_type = other RNA
ttgtacaaacagataacac

SEQ ID NO: 460 - RNA, 19 nt, synthetic construct
  misc_feature 1..19: note = Synthetic: CD274-3308
  source 1..19: mol_type = other RNA
tatgtacaaacagataaca

SEQ ID NO: 461 - RNA, 19 nt, synthetic construct
  misc_feature 1..19: note = Synthetic: CD274-3310
  source 1..19: mol_type = other RNA
tacatgtacaaacagataa

SEQ ID NO: 462 - RNA, 19 nt, synthetic construct
  misc_feature 1..19: note = Synthetic: CD274-3319
  source 1..19: mol_type = other RNA
ttacaaatgcacatgtaca

SEQ ID NO: 463 - RNA, 19 nt, synthetic construct
  misc_feature 1..19: note = Synthetic: CD274-3325
  source 1..19: mol_type = other RNA
tttactgtacaaatgcaca

SEQ ID NO: 464 - RNA, 19 nt, synthetic construct
  misc_feature 1..19: note = Synthetic: CD274-3355
  source 1..19: mol_type = other RNA
ttaattcacacaaagaaca

SEQ ID NO: 465 - RNA, 19 nt, synthetic construct
  misc_feature 1..19: note = Synthetic: CD274-3357
  source 1..19: mol_type = other RNA
ttgtaattcacacaaagaa

SEQ ID NO: 466 - RNA, 19 nt, synthetic construct
  misc_feature 1..19: note = Synthetic: CD274-3441
  source 1..19: mol_type = other RNA
ttacaaatccaacaccaca

SEQ ID NO: 467 - RNA, 19 nt, synthetic construct
  misc_feature 1..19: note = Synthetic: CD274-3522
  source 1..19: mol_type = other RNA
ttgacaatcaaatgcagaa

SEQ ID NO: 468 - RNA, 19 nt, synthetic construct
  misc_feature 1..19: note = Synthetic: CD274-3528
  source 1..19: mol_type = other RNA
taaaaagtgacaatcaaat

SEQ ID NO: 469 - RNA, 19 nt, synthetic construct
  misc_feature 1..19: note = Synthetic: CD274-3531
  source 1..19: mol_type = other RNA
ttacaaaaagtgacaatca

SEQ ID NO: 470 - RNA, 19 nt, synthetic construct
  misc_feature 1..19: note = Synthetic: CD274-3532
  source 1..19: mol_type = other RNA
tgtacaaaaagtgacaatc

SEQ ID NO: 471 - RNA, 19 nt, synthetic construct
  misc_feature 1..19: note = Synthetic: CD274-3534
  source 1..19: mol_type = other RNA
taggtacaaaaagtgacaa

SEQ ID NO: 472 - RNA, 19 nt, synthetic construct
  misc_feature 1..19: note = Synthetic: CD274-3541
  source 1..19: mol_type = other RNA
tttaatgcaggtacaaaaa

SEQ ID NO: 473 - RNA, 19 nt, synthetic construct
  misc_feature 1..19: note = Synthetic: CD274-3542
  source 1..19: mol_type = other RNA
tattaatgcaggtacaaaa

SEQ ID NO: 474 - RNA, 19 nt, synthetic construct
  misc_feature 1..19: note = Synthetic: CD274-3545
  source 1..19: mol_type = other RNA
ttaaattaatgcaggtaca

SEQ ID NO: 475 - RNA, 19 nt, synthetic construct
  misc_feature 1..19: note = Synthetic: CD274-3546
  source 1..19: mol_type = other RNA
tttaaattaatgcaggtac

SEQ ID NO: 476 - RNA, 19 nt, synthetic construct
  misc_feature 1..19: note = Synthetic: CD274-3569
  source 1..19: mol_type = other RNA
tacaaaataaataagaata

SEQ ID NO: 477 - RNA, 19 nt, synthetic construct
  misc_feature 1..19: note = Synthetic: CD274-3577
  source 1..19: mol_type = other RNA
taccaagtaacaaaataaa

SEQ ID NO: 478 - RNA, 19 nt, synthetic construct
  misc_feature 1..19: note = Synthetic: CD274-3578
  source 1..19: mol_type = other RNA
ttaccaagtaacaaaataa

SEQ ID NO: 479 - RNA, 19 nt, synthetic construct
  misc_feature 1..19: note = Synthetic: CD274-3580
  source 1..19: mol_type = other RNA
ttgtaccaagtaacaaaat

SEQ ID NO: 480 - RNA, 19 nt, synthetic construct
  misc_feature 1..19: note = Synthetic: CD274-3604
  source 1..19: mol_type = other RNA
ttaaacaagaaaatggaca

SEQ ID NO: 481 - RNA, 19 nt, synthetic construct
  misc_feature 1..19: note = Synthetic: CD274-3610
  source 1..19: mol_type = other RNA
tacaaaataaacaagaaaa

SEQ ID NO: 482 - RNA, 19 nt, synthetic construct
  misc_feature 1..19: note = Synthetic: CD274-3622
  source 1..19: mol_type = other RNA
tattttattaaacacaaaa

SEQ ID NO: 483 - RNA, 36 nt, synthetic construct
  misc_feature 1..36: note = Synthetic: CD274-0088
  source 1..36: mol_type = other RNA
agaaagatgaggatatttgagcagccgaaaggctgc

SEQ ID NO: 484 - RNA, 36 nt, synthetic construct
  misc_feature 1..36: note = Synthetic: CD274-0094
  source 1..36: mol_type = other RNA
atgaggatatttgctgtctagcagccgaaaggctgc

SEQ ID NO: 485 - skipped

SEQ ID NO: 486 - RNA, 36 nt, synthetic construct
  misc_feature 1..36: note = Synthetic: CD274-0097
  source 1..36: mol_type = other RNA
aggatatttgctgtctttaagcagccgaaaggctgc

SEQ ID NO: 487 - RNA, 36 nt, synthetic construct
  misc_feature 1..36: note = Synthetic: CD274-0098
  source 1..36: mol_type = other RNA
ggatatttgctgtctttatagcagccgaaaggctgc

SEQ ID NO: 488 - RNA, 36 nt, synthetic construct
  misc_feature 1..36: note = Synthetic: CD274-0100
  source 1..36: mol_type = other RNA
atatttgctgtctttatatagcagccgaaaggctgc

SEQ ID NO: 489 - RNA, 36 nt, synthetic construct
  misc_feature 1..36: note = Synthetic: CD274-0102
  source 1..36: mol_type = other RNA
atttgctgtctttatattcagcagccgaaaggctgc

SEQ ID NO: 490 - RNA, 36 nt, synthetic construct
  misc_feature 1..36: note = Synthetic: CD274-0167
  source 1..36: mol_type = other RNA
aggacctatatgtggtagaagcagccgaaaggctgc

SEQ ID NO: 491 - RNA, 36 nt, synthetic construct
  misc_feature 1..36: note = Synthetic: CD274-0193
  source 1..36: mol_type = other RNA
agcaatatgacaattgaatagcagccgaaaggctgc

SEQ ID NO: 492 - RNA, 36 nt, synthetic construct
  misc_feature 1..36: note = Synthetic: CD274-0194
  source 1..36: mol_type = other RNA
gcaatatgacaattgaatgagcagccgaaaggctgc

SEQ ID NO: 493 - RNA, 36 nt, synthetic construct
  misc_feature 1..36: note = Synthetic: CD274-0197
  source 1..36: mol_type = other RNA
atatgacaattgaatgcaaagcagccgaaaggctgc

SEQ ID NO: 494 - RNA, 36 nt, synthetic construct
  misc_feature 1..36: note = Synthetic: CD274-0200
  source 1..36: mol_type = other RNA
tgacaattgaatgcaaattagcagccgaaaggctgc

SEQ ID NO: 495 - RNA, 36 nt, synthetic construct
  misc_feature 1..36: note = Synthetic: CD274-0204
  source 1..36: mol_type = other RNA
aattgaatgcaaattcccaagcagccgaaaggctgc

SEQ ID NO: 496 - RNA, 36 nt, synthetic construct
  misc_feature 1..36: note = Synthetic: CD274-0219
  source 1..36: mol_type = other RNA
cccagtagaaaaacaattaagcagccgaaaggctgc

SEQ ID NO: 497 - RNA, 36 nt, synthetic construct
  misc_feature 1..36: note = Synthetic: CD274-0222
  source 1..36: mol_type = other RNA
agtagaaaaacaattagacagcagccgaaaggctgc

SEQ ID NO: 498 - RNA, 36 nt, synthetic construct
  misc_feature 1..36: note = Synthetic: CD274-0225
  source 1..36: mol_type = other RNA
agaaaaacaattagacctgagcagccgaaaggctgc

SEQ ID NO: 499 - RNA, 36 nt, synthetic construct
  misc_feature 1..36: note = Synthetic: CD274-0268
  source 1..36: mol_type = other RNA
atggaggataagaacattaagcagccgaaaggctgc

SEQ ID NO: 500 - RNA, 36 nt, synthetic construct
  misc_feature 1..36: note = Synthetic: CD274-0269
  source 1..36: mol_type = other RNA
tggaggataagaacattatagcagccgaaaggctgc

SEQ ID NO: 501 - RNA, 36 nt, synthetic construct
  misc_feature 1..36: note = Synthetic: CD274-0271
  source 1..36: mol_type = other RNA
gaggataagaacattattcagcagccgaaaggctgc

SEQ ID NO: 502 - RNA, 36 nt, synthetic construct
  misc_feature 1..36: note = Synthetic: CD274-0274
  source 1..36: mol_type = other RNA
gataagaacattattcaatagcagccgaaaggctgc

SEQ ID NO: 503 - RNA, 36 nt, synthetic construct
  misc_feature 1..36: note = Synthetic: CD274-0275
  source 1..36: mol_type = other RNA
ataagaacattattcaattagcagccgaaaggctgc

SEQ ID NO: 504 - RNA, 36 nt, synthetic construct
  misc_feature 1..36: note = Synthetic: CD274-0277
  source 1..36: mol_type = other RNA
aagaacattattcaatttgagcagccgaaaggctgc

SEQ ID NO: 505 - RNA, 36 nt, synthetic construct
  misc_feature 1..36: note = Synthetic: CD274-0282
  source 1..36: mol_type = other RNA
cattattcaatttgtgcatagcagccgaaaggctgc

SEQ ID NO: 506 - RNA, 36 nt, synthetic construct
  misc_feature 1..36: note = Synthetic: CD274-0283
  source 1..36: mol_type = other RNA
attattcaatttgtgcatgagcagccgaaaggctgc

SEQ ID NO: 507 - RNA, 36 nt, synthetic construct
  misc_feature 1..36: note = Synthetic: CD274-0394
  source 1..36: mol_type = other RNA
atcacagatgtgaaattgcagcagccgaaaggctgc

SEQ ID NO: 508 - RNA, 36 nt, synthetic construct
  misc_feature 1..36: note = Synthetic: CD274-0399
  source 1..36: mol_type = other RNA
agatgtgaaattgcaggatagcagccgaaaggctgc

SEQ ID NO: 509 - RNA, 36 nt, synthetic construct
  misc_feature 1..36: note = Synthetic: CD274-0530
  source 1..36: mol_type = other RNA
cagtcacctctgaacatgaagcagccgaaaggctgc

SEQ ID NO: 510 - RNA, 36 nt, synthetic construct
  misc_feature 1..36: note = Synthetic: CD274-0531
  source 1..36: mol_type = other RNA
agtcacctctgaacatgaaagcagccgaaaggctgc

SEQ ID NO: 511 - RNA, 36 nt, synthetic construct
  misc_feature 1..36: note = Synthetic: CD274-0653
  source 1..36: mol_type = other RNA
aggagaagcttttcaatgtagcagccgaaaggctgc

SEQ ID NO: 512 - RNA, 36 nt, synthetic construct
  misc_feature 1..36: note = Synthetic: CD274-0673
  source 1..36: mol_type = other RNA
accagcacactgagaatcaagcagccgaaaggctgc

SEQ ID NO: 513 - RNA, 36 nt, synthetic construct
  misc_feature 1..36: note = Synthetic: CD274-0693
  source 1..36: mol_type = other RNA
cacaacaactaatgagattagcagccgaaaggctgc

SEQ ID NO: 514 - RNA, 36 nt, synthetic construct
  misc_feature 1..36: note = Synthetic: CD274-0697
  source 1..36: mol_type = other RNA
acaactaatgagattttctagcagccgaaaggctgc

SEQ ID NO: 515 - RNA, 36 nt, synthetic construct
  misc_feature 1..36: note = Synthetic: CD274-0700
  source 1..36: mol_type = other RNA
actaatgagattttctactagcagccgaaaggctgc

SEQ ID NO: 516 - RNA, 36 nt, synthetic construct
  misc_feature 1..36: note = Synthetic: CD274-0701
  source 1..36: mol_type = other RNA
ctaatgagattttctactgagcagccgaaaggctgc

SEQ ID NO: 517 - RNA, 36 nt, synthetic construct
  misc_feature 1..36: note = Synthetic: CD274-0743
  source 1..36: mol_type = other RNA
aggaaaaccatacagctgaagcagccgaaaggctgc

SEQ ID NO: 518 - RNA, 36 nt, synthetic construct
  misc_feature 1..36: note = Synthetic: CD274-0746
  source 1..36: mol_type = other RNA
aaaaccatacagctgaattagcagccgaaaggctgc

SEQ ID NO: 519 - RNA, 36 nt, synthetic construct
  misc_feature 1..36: note = Synthetic: CD274-0095
  source 1..36: mol_type = other RNA
tgaggatatttgctgtcttagcagccgaaaggctgc

SEQ ID NO: 520 - RNA, 36 nt, synthetic construct
  misc_feature 1..36: note = Synthetic: CD274-0099
  source 1..36: mol_type = other RNA
gatatttgctgtctttataagcagccgaaaggctgc

SEQ ID NO: 521 - RNA, 36 nt, synthetic construct
  misc_feature 1..36: note = Synthetic: CD274-0103
  source 1..36: mol_type = other RNA
tttgctgtctttatattcaagcagccgaaaggctgc

SEQ ID NO: 522 - RNA, 36 nt, synthetic construct
  misc_feature 1..36: note = Synthetic: CD274-0195
  source 1..36: mol_type = other RNA
caatatgacaattgaatgcagcagccgaaaggctgc

SEQ ID NO: 523 - RNA, 36 nt, synthetic construct
  misc_feature 1..36: note = Synthetic: CD274-0196
  source 1..36: mol_type = other RNA
aatatgacaattgaatgcaagcagccgaaaggctgc

SEQ ID NO: 524 - RNA, 36 nt, synthetic construct
  misc_feature 1..36: note = Synthetic: CD274-0198
  source 1..36: mol_type = other RNA
tatgacaattgaatgcaaaagcagccgaaaggctgc

SEQ ID NO: 525 - RNA, 36 nt, synthetic construct
  misc_feature 1..36: note = Synthetic: CD274-0199
  source 1..36: mol_type = other RNA
atgacaattgaatgcaaatagcagccgaaaggctgc

SEQ ID NO: 526 - RNA, 36 nt, synthetic construct
  misc_feature 1..36: note = Synthetic: CD274-0201
  source 1..36: mol_type = other RNA
gacaattgaatgcaaattcagcagccgaaaggctgc

SEQ ID NO: 527 - RNA, 36 nt, synthetic construct
  misc_feature 1..36: note = Synthetic: CD274-0202
  source 1..36: mol_type = other RNA
acaattgaatgcaaattccagcagccgaaaggctgc

SEQ ID NO: 528 - RNA, 36 nt, synthetic construct
  misc_feature 1..36: note = Synthetic: CD274-0207
  source 1..36: mol_type = other RNA
tgaatgcaaattcccagtaagcagccgaaaggctgc

SEQ ID NO: 529 - RNA, 36 nt, synthetic construct
  misc_feature 1..36: note = Synthetic: CD274-0221
  source 1..36: mol_type = other RNA
cagtagaaaaacaattagaagcagccgaaaggctgc

SEQ ID NO: 530 - RNA, 36 nt, synthetic construct
  misc_feature 1..36: note = Synthetic: CD274-0245
  source 1..36: mol_type = other RNA
ctgcactaattgtctattgagcagccgaaaggctgc

SEQ ID NO: 531 - RNA, 36 nt, synthetic construct
  misc_feature 1..36: note = Synthetic: CD274-0248
  source 1..36: mol_type = other RNA
cactaattgtctattgggaagcagccgaaaggctgc

SEQ ID NO: 532 - RNA, 36 nt, synthetic construct
  misc_feature 1..36: note = Synthetic: CD274-0249
  source 1..36: mol_type = other RNA
actaattgtctattgggaaagcagccgaaaggctgc

SEQ ID NO: 533 - RNA, 36 nt, synthetic construct
  misc_feature 1..36: note = Synthetic: CD274-0265
  source 1..36: mol_type = other RNA
gaaatggaggataagaacaagcagccgaaaggctgc

SEQ ID NO: 534 - RNA, 36 nt, synthetic construct
  misc_feature 1..36: note = Synthetic: CD274-0266
  source 1..36: mol_type = other RNA
aaatggaggataagaacatagcagccgaaaggctgc

SEQ ID NO: 535 - RNA, 36 nt, synthetic construct
  misc_feature 1..36: note = Synthetic: CD274-0267
  source 1..36: mol_type = other RNA
aatggaggataagaacattagcagccgaaaggctgc

SEQ ID NO: 536 - RNA, 36 nt, synthetic construct
  misc_feature 1..36: note = Synthetic: CD274-0270
  source 1..36: mol_type = other RNA
ggaggataagaacattattagcagccgaaaggctgc

SEQ ID NO: 537 - RNA, 36 nt, synthetic construct
  misc_feature 1..36: note = Synthetic: CD274-0272
  source 1..36: mol_type = other RNA
aggataagaacattattcaagcagccgaaaggctgc

SEQ ID NO: 538 - RNA, 36 nt, synthetic construct
  misc_feature 1..36: note = Synthetic: CD274-0273
  source 1..36: mol_type = other RNA
ggataagaacattattcaaagcagccgaaaggctgc

SEQ ID NO: 539 - RNA, 36 nt, synthetic construct
  misc_feature 1..36: note = Synthetic: CD274-0276
  source 1..36: mol_type = other RNA
taagaacattattcaatttagcagccgaaaggctgc

SEQ ID NO: 540 - RNA, 36 nt, synthetic construct
  misc_feature 1..36: note = Synthetic: CD274-0278
  source 1..36: mol_type = other RNA
agaacattattcaatttgtagcagccgaaaggctgc

SEQ ID NO: 541 - RNA, 36 nt, synthetic construct
  misc_feature 1..36: note = Synthetic: CD274-0279
  source 1..36: mol_type = other RNA
gaacattattcaatttgtgagcagccgaaaggctgc

SEQ ID NO: 542 - RNA, 36 nt, synthetic construct
  misc_feature 1..36: note = Synthetic: CD274-0280
  source 1..36: mol_type = other RNA
aacattattcaatttgtgcagcagccgaaaggctgc

SEQ ID NO: 543 - RNA, 36 nt, synthetic construct
  misc_feature 1..36: note = Synthetic: CD274-0281
  source 1..36: mol_type = other RNA
acattattcaatttgtgcaagcagccgaaaggctgc

SEQ ID NO: 544 - RNA, 36 nt, synthetic construct
  misc_feature 1..36: note = Synthetic: CD274-0285
  source 1..36: mol_type = other RNA
tattcaatttgtgcatggaagcagccgaaaggctgc

SEQ ID NO: 545 - RNA, 36 nt, synthetic construct
  misc_feature 1..36: note = Synthetic: CD274-0303
  source 1..36: mol_type = other RNA
agaggaagacctgaaggttagcagccgaaaggctgc

SEQ ID NO: 546 - RNA, 36 nt, synthetic construct
  misc_feature 1..36: note = Synthetic: CD274-0305
  source 1..36: mol_type = other RNA
aggaagacctgaaggttcaagcagccgaaaggctgc

SEQ ID NO: 547 - RNA, 36 nt, synthetic construct
  misc_feature 1..36: note = Synthetic: CD274-0308
  source 1..36: mol_type = other RNA
aagacctgaaggttcagcaagcagccgaaaggctgc

SEQ ID NO: 548 - RNA, 36 nt, synthetic construct
  misc_feature 1..36: note = Synthetic: CD274-0309
  source 1..36: mol_type = other RNA
agacctgaaggttcagcatagcagccgaaaggctgc

SEQ ID NO: 549 - RNA, 36 nt, synthetic construct
  misc_feature 1..36: note = Synthetic: CD274-0310
  source 1..36: mol_type = other RNA
gacctgaaggttcagcataagcagccgaaaggctgc

SEQ ID NO: 550 - RNA, 36 nt, synthetic construct
  misc_feature 1..36: note = Synthetic: CD274-0312
  source 1..36: mol_type = other RNA
cctgaaggttcagcatagtagcagccgaaaggctgc

SEQ ID NO: 551 - RNA, 36 nt, synthetic construct
  misc_feature 1..36: note = Synthetic: CD274-0313
  source 1..36: mol_type = other RNA
ctgaaggttcagcatagtaagcagccgaaaggctgc

SEQ ID NO: 552 - RNA, 36 nt, synthetic construct
  misc_feature 1..36: note = Synthetic: CD274-0392
  source 1..36: mol_type = other RNA
agatcacagatgtgaaattagcagccgaaaggctgc

SEQ ID NO: 553 - RNA, 36 nt, synthetic construct
  misc_feature 1..36: note = Synthetic: CD274-0395
  source 1..36: mol_type = other RNA
tcacagatgtgaaattgcaagcagccgaaaggctgc

SEQ ID NO: 554 - RNA, 36 nt, synthetic construct
  misc_feature 1..36: note = Synthetic: CD274-0398
  source 1..36: mol_type = other RNA
cagatgtgaaattgcaggaagcagccgaaaggctgc

SEQ ID NO: 555 - RNA, 36 nt, synthetic construct
  misc_feature 1..36: note = Synthetic: CD274-0497
  source 1..36: mol_type = other RNA
acaaaatcaaccaaagaatagcagccgaaaggctgc

SEQ ID NO: 556 - RNA, 36 nt, synthetic construct
  misc_feature 1..36: note = Synthetic: CD274-0499
  source 1..36: mol_type = other RNA
aaaatcaaccaaagaatttagcagccgaaaggctgc

SEQ ID NO: 557 - RNA, 36 nt, synthetic construct
  misc_feature 1..36: note = Synthetic: CD274-0500
  source 1..36: mol_type = other RNA
aaatcaaccaaagaattttagcagccgaaaggctgc

SEQ ID NO: 558 - RNA, 36 nt, synthetic construct
  misc_feature 1..36: note = Synthetic: CD274-0501
  source 1..36: mol_type = other RNA
aatcaaccaaagaattttgagcagccgaaaggctgc

SEQ ID NO: 559 - RNA, 36 nt, synthetic construct
  misc_feature 1..36: note = Synthetic: CD274-0502
  source 1..36: mol_type = other RNA
atcaaccaaagaattttggagcagccgaaaggctgc

SEQ ID NO: 560 - RNA, 36 nt, synthetic construct
  misc_feature 1..36: note = Synthetic: CD274-0504
  source 1..36: mol_type = other RNA
caaccaaagaattttggttagcagccgaaaggctgc

SEQ ID NO: 561 - RNA, 36 nt, synthetic construct
  misc_feature 1..36: note = Synthetic: CD274-0505
  source 1..36: mol_type = other RNA
aaccaaagaattttggttgagcagccgaaaggctgc

SEQ ID NO: 562 - RNA, 36 nt, synthetic construct
  misc_feature 1..36: note = Synthetic: CD274-0506
  source 1..36: mol_type = other RNA
accaaagaattttggttgtagcagccgaaaggctgc

SEQ ID NO: 563 - RNA, 36 nt, synthetic construct
  misc_feature 1..36: note = Synthetic: CD274-0507
  source 1..36: mol_type = other RNA
ccaaagaattttggttgtgagcagccgaaaggctgc

SEQ ID NO: 564 - RNA, 36 nt, synthetic construct
  misc_feature 1..36: note = Synthetic: CD274-0509
  source 1..36: mol_type = other RNA
aaagaattttggttgtggaagcagccgaaaggctgc

SEQ ID NO: 565 - RNA, 36 nt, synthetic construct
  misc_feature 1..36: note = Synthetic: CD274-0510
  source 1..36: mol_type = other RNA
aagaattttggttgtggatagcagccgaaaggctgc

SEQ ID NO: 566 - RNA, 36 nt, synthetic construct
  misc_feature 1..36: note = Synthetic: CD274-0511
  source 1..36: mol_type = other RNA
agaattttggttgtggatcagcagccgaaaggctgc

SEQ ID NO: 567 - RNA, 36 nt, synthetic construct
  misc_feature 1..36: note = Synthetic: CD274-0513
  source 1..36: mol_type = other RNA
aattttggttgtggatccaagcagccgaaaggctgc

SEQ ID NO: 568 - RNA, 36 nt, synthetic construct
  misc_feature 1..36: note = Synthetic: CD274-0535
  source 1..36: mol_type = other RNA
acctctgaacatgaactgaagcagccgaaaggctgc

SEQ ID NO: 569 - RNA, 36 nt, synthetic construct
  misc_feature 1..36: note = Synthetic: CD274-0537
  source 1..36: mol_type = other RNA
ctctgaacatgaactgacaagcagccgaaaggctgc

SEQ ID NO: 570 - RNA, 36 nt, synthetic construct
  misc_feature 1..36: note = Synthetic: CD274-0542
  source 1..36: mol_type = other RNA
aacatgaactgacatgtcaagcagccgaaaggctgc

SEQ ID NO: 571 - RNA, 36 nt, synthetic construct
  misc_feature 1..36: note = Synthetic: CD274-0583
  source 1..36: mol_type = other RNA
gaagtcatctggacaagcaagcagccgaaaggctgc

SEQ ID NO: 572 - RNA, 36 nt, synthetic construct
  misc_feature 1..36: note = Synthetic: CD274-0594
  source 1..36: mol_type = other RNA
gacaagcagtgaccatcaaagcagccgaaaggctgc

SEQ ID NO: 573 - RNA, 36 nt, synthetic construct
  misc_feature 1..36: note = Synthetic: CD274-0601
  source 1..36: mol_type = other RNA
agtgaccatcaagtcctgaagcagccgaaaggctgc

SEQ ID NO: 574 - RNA, 36 nt, synthetic construct
  misc_feature 1..36: note = Synthetic: CD274-0654
  source 1..36: mol_type = other RNA
ggagaagcttttcaatgtgagcagccgaaaggctgc

SEQ ID NO: 575 - RNA, 36 nt, synthetic construct
  misc_feature 1..36: note = Synthetic: CD274-0655
  source 1..36: mol_type = other RNA
gagaagcttttcaatgtgaagcagccgaaaggctgc

SEQ ID NO: 576 - RNA, 36 nt, synthetic construct
  misc_feature 1..36: note = Synthetic: CD274-0656
  source 1..36: mol_type = other RNA
agaagcttttcaatgtgacagcagccgaaaggctgc

SEQ ID NO: 577 - RNA, 36 nt, synthetic construct
  misc_feature 1..36: note = Synthetic: CD274-0658
  source 1..36: mol_type = other RNA
aagcttttcaatgtgaccaagcagccgaaaggctgc

SEQ ID NO: 578 - RNA, 36 nt, synthetic construct
  misc_feature 1..36: note = Synthetic: CD274-0661
  source 1..36: mol_type = other RNA
cttttcaatgtgaccagcaagcagccgaaaggctgc

SEQ ID NO: 579 - RNA, 36 nt, synthetic construct
  misc_feature 1..36: note = Synthetic: CD274-0667
  source 1..36: mol_type = other RNA
aatgtgaccagcacactgaagcagccgaaaggctgc

SEQ ID NO: 580 - RNA, 36 nt, synthetic construct
  misc_feature 1..36: note = Synthetic: CD274-0676
  source 1..36: mol_type = other RNA
agcacactgagaatcaacaagcagccgaaaggctgc

SEQ ID NO: 581 - RNA, 36 nt, synthetic construct
  misc_feature 1..36: note = Synthetic: CD274-0679
  source 1..36: mol_type = other RNA
acactgagaatcaacacaaagcagccgaaaggctgc

SEQ ID NO: 582 - RNA, 36 nt, synthetic construct
  misc_feature 1..36: note = Synthetic: CD274-0681
  source 1..36: mol_type = other RNA
actgagaatcaacacaacaagcagccgaaaggctgc

SEQ ID NO: 583 - RNA, 36 nt, synthetic construct
  misc_feature 1..36: note = Synthetic: CD274-0685
  source 1..36: mol_type = other RNA
agaatcaacacaacaactaagcagccgaaaggctgc

SEQ ID NO: 584 - RNA, 36 nt, synthetic construct
  misc_feature 1..36: note = Synthetic: CD274-0692
  source 1..36: mol_type = other RNA
acacaacaactaatgagatagcagccgaaaggctgc

SEQ ID NO: 585 - RNA, 36 nt, synthetic construct
  misc_feature 1..36: note = Synthetic: CD274-0695
  source 1..36: mol_type = other RNA
caacaactaatgagattttagcagccgaaaggctgc

SEQ ID NO: 586 - RNA, 36 nt, synthetic construct
  misc_feature 1..36: note = Synthetic: CD274-0696
  source 1..36: mol_type = other RNA
aacaactaatgagattttcagcagccgaaaggctgc

SEQ ID NO: 587 - RNA, 36 nt, synthetic construct
  misc_feature 1..36: note = Synthetic: CD274-0698
  source 1..36: mol_type = other RNA
caactaatgagattttctaagcagccgaaaggctgc

SEQ ID NO: 588 - RNA, 36 nt, synthetic construct
  misc_feature 1..36: note = Synthetic: CD274-0703
  source 1..36: mol_type = other RNA
aatgagattttctactgcaagcagccgaaaggctgc

SEQ ID NO: 589 - RNA, 36 nt, synthetic construct
  misc_feature 1..36: note = Synthetic: CD274-0709
  source 1..36: mol_type = other RNA
attttctactgcacttttaagcagccgaaaggctgc

SEQ ID NO: 590 - RNA, 36 nt, synthetic construct
  misc_feature 1..36: note = Synthetic: CD274-0745
  source 1..36: mol_type = other RNA
gaaaaccatacagctgaatagcagccgaaaggctgc

SEQ ID NO: 591 - RNA, 36 nt, synthetic construct
  misc_feature 1..36: note = Synthetic: CD274-0749
  source 1..36: mol_type = other RNA
accatacagctgaattggtagcagccgaaaggctgc

SEQ ID NO: 592 - RNA, 36 nt, synthetic construct
  misc_feature 1..36: note = Synthetic: CD274-0752
  source 1..36: mol_type = other RNA
atacagctgaattggtcatagcagccgaaaggctgc

SEQ ID NO: 593 - RNA, 36 nt, synthetic construct
  misc_feature 1..36: note = Synthetic: CD274-0800
  source 1..36: mol_type = other RNA
atgaaaggactcacttggtagcagccgaaaggctgc

SEQ ID NO: 594 - RNA, 36 nt, synthetic construct
  misc_feature 1..36: note = Synthetic: CD274-0804
  source 1..36: mol_type = other RNA
aaggactcacttggtaattagcagccgaaaggctgc

SEQ ID NO: 595 - RNA, 36 nt, synthetic construct
  misc_feature 1..36: note = Synthetic: CD274-0847
  source 1..36: mol_type = other RNA
ggtgtagcactgacattcaagcagccgaaaggctgc

SEQ ID NO: 596 - RNA, 36 nt, synthetic construct
  misc_feature 1..36: note = Synthetic: CD274-0852
  source 1..36: mol_type = other RNA
agcactgacattcatcttcagcagccgaaaggctgc

SEQ ID NO: 597 - RNA, 36 nt, synthetic construct
  misc_feature 1..36: note = Synthetic: CD274-0889
  source 1..36: mol_type = other RNA
atgatggatgtgaaaaaatagcagccgaaaggctgc

SEQ ID NO: 598 - RNA, 36 nt, synthetic construct
  misc_feature 1..36: note = Synthetic: CD274-1172
  source 1..36: mol_type = other RNA
ggagaccttgatactttcaagcagccgaaaggctgc

SEQ ID NO: 599 - RNA, 36 nt, synthetic construct
  misc_feature 1..36: note = Synthetic: CD274-1173
  source 1..36: mol_type = other RNA
gagaccttgatactttcaaagcagccgaaaggctgc

SEQ ID NO: 600 - RNA, 36 nt, synthetic construct
  misc_feature 1..36: note = Synthetic: CD274-1174
  source 1..36: mol_type = other RNA
agaccttgatactttcaaaagcagccgaaaggctgc

SEQ ID NO: 601 - RNA, 36 nt, synthetic construct
  misc_feature 1..36: note = Synthetic: CD274-1176
  source 1..36: mol_type = other RNA
accttgatactttcaaatgagcagccgaaaggctgc

SEQ ID NO: 602 - RNA, 36 nt, synthetic construct
  misc_feature 1..36: note = Synthetic: CD274-1178
  source 1..36: mol_type = other RNA
cttgatactttcaaatgccagcagccgaaaggctgc

SEQ ID NO: 603 - RNA, 36 nt, synthetic construct
  misc_feature 1..36: note = Synthetic: CD274-1227
  source 1..36: mol_type = other RNA
gaaaggatacttctgaacaagcagccgaaaggctgc

SEQ ID NO: 604 - RNA, 36 nt, synthetic construct
  misc_feature 1..36: note = Synthetic: CD274-1231
  source 1..36: mol_type = other RNA
ggatacttctgaacaaggaagcagccgaaaggctgc

SEQ ID NO: 605 - RNA, 36 nt, synthetic construct
  misc_feature 1..36: note = Synthetic: CD274-1423
  source 1..36: mol_type = other RNA
ctatttattttgagtctgtagcagccgaaaggctgc

SEQ ID NO: 606 - RNA, 36 nt, synthetic construct
  misc_feature 1..36: note = Synthetic: CD274-1425
  source 1..36: mol_type = other RNA
atttattttgagtctgtgaagcagccgaaaggctgc

SEQ ID NO: 607 - RNA, 36 nt, synthetic construct
  misc_feature 1..36: note = Synthetic: CD274-1459
  source 1..36: mol_type = other RNA
tgagtgtggttgtgaatgaagcagccgaaaggctgc

SEQ ID NO: 608 - RNA, 36 nt, synthetic construct
  misc_feature 1..36: note = Synthetic: CD274-1460
  source 1..36: mol_type = other RNA
gagtgtggttgtgaatgatagcagccgaaaggctgc

SEQ ID NO: 609 - RNA, 36 nt, synthetic construct
  misc_feature 1..36: note = Synthetic: CD274-1461
  source 1..36: mol_type = other RNA
agtgtggttgtgaatgattagcagccgaaaggctgc

SEQ ID NO: 610 - RNA, 36 nt, synthetic construct
  misc_feature 1..36: note = Synthetic: CD274-1462
  source 1..36: mol_type = other RNA
gtgtggttgtgaatgatttagcagccgaaaggctgc

SEQ ID NO: 611 - RNA, 36 nt, synthetic construct
  misc_feature 1..36: note = Synthetic: CD274-1463
  source 1..36: mol_type = other RNA
tgtggttgtgaatgatttcagcagccgaaaggctgc

SEQ ID NO: 612 - RNA, 36 nt, synthetic construct
  misc_feature 1..36: note = Synthetic: CD274-1464
  source 1..36: mol_type = other RNA
gtggttgtgaatgatttctagcagccgaaaggctgc

SEQ ID NO: 613 - RNA, 36 nt, synthetic construct
  misc_feature 1..36: note = Synthetic: CD274-1465
  source 1..36: mol_type = other RNA
tggttgtgaatgatttcttagcagccgaaaggctgc

SEQ ID NO: 614 - RNA, 36 nt, synthetic construct
  misc_feature 1..36: note = Synthetic: CD274-1467
  source 1..36: mol_type = other RNA
gttgtgaatgatttcttttagcagccgaaaggctgc

SEQ ID NO: 615 - RNA, 36 nt, synthetic construct
  misc_feature 1..36: note = Synthetic: CD274-1469
  source 1..36: mol_type = other RNA
tgtgaatgatttcttttgaagcagccgaaaggctgc

SEQ ID NO: 616 - RNA, 36 nt, synthetic construct
  misc_feature 1..36: note = Synthetic: CD274-1470
  source 1..36: mol_type = other RNA
gtgaatgatttcttttgaaagcagccgaaaggctgc

SEQ ID NO: 617 - RNA, 36 nt, synthetic construct
  misc_feature 1..36: note = Synthetic: CD274-1473
  source 1..36: mol_type = other RNA
aatgatttcttttgaagatagcagccgaaaggctgc

SEQ ID NO: 618 - RNA, 36 nt, synthetic construct
  misc_feature 1..36: note = Synthetic: CD274-1474
  source 1..36: mol_type = other RNA
atgatttcttttgaagataagcagccgaaaggctgc

SEQ ID NO: 619 - RNA, 36 nt, synthetic construct
  misc_feature 1..36: note = Synthetic: CD274-1481
  source 1..36: mol_type = other RNA
cttttgaagatatattgtaagcagccgaaaggctgc

SEQ ID NO: 620 - RNA, 36 nt, synthetic construct
  misc_feature 1..36: note = Synthetic: CD274-1484
  source 1..36: mol_type = other RNA
ttgaagatatattgtagtaagcagccgaaaggctgc

SEQ ID NO: 621 - RNA, 36 nt, synthetic construct
  misc_feature 1..36: note = Synthetic: CD274-1486
  source 1..36: mol_type = other RNA
gaagatatattgtagtagaagcagccgaaaggctgc

SEQ ID NO: 622 - RNA, 36 nt, synthetic construct
  misc_feature 1..36: note = Synthetic: CD274-1499
  source 1..36: mol_type = other RNA
agtagatgttacaattttgagcagccgaaaggctgc

SEQ ID NO: 623 - RNA, 36 nt, synthetic construct
  misc_feature 1..36: note = Synthetic: CD274-1500
  source 1..36: mol_type = other RNA
gtagatgttacaattttgtagcagccgaaaggctgc

SEQ ID NO: 624 - RNA, 36 nt, synthetic construct
  misc_feature 1..36: note = Synthetic: CD274-1541
  source 1..36: mol_type = other RNA
aatgatttgctcacatctaagcagccgaaaggctgc

SEQ ID NO: 625 - RNA, 36 nt, synthetic construct
  misc_feature 1..36: note = Synthetic: CD274-1562
  source 1..36: mol_type = other RNA
aaaacatggagtatttgtaagcagccgaaaggctgc

SEQ ID NO: 626 - RNA, 36 nt, synthetic construct
  misc_feature 1..36: note = Synthetic: CD274-1606
  source 1..36: mol_type = other RNA
caagtatacattggaagcaagcagccgaaaggctgc

SEQ ID NO: 627 - RNA, 36 nt, synthetic construct
  misc_feature 1..36: note = Synthetic: CD274-1607
  source 1..36: mol_type = other RNA
aagtatacattggaagcatagcagccgaaaggctgc

SEQ ID NO: 628 - RNA, 36 nt, synthetic construct
  misc_feature 1..36: note = Synthetic: CD274-1649
  source 1..36: mol_type = other RNA
aggatgtcacctttatttaagcagccgaaaggctgc

SEQ ID NO: 629 - RNA, 36 nt, synthetic construct
  misc_feature 1..36: note = Synthetic: CD274-1728
  source 1..36: mol_type = other RNA
ctgttccatttaaatatcaagcagccgaaaggctgc

SEQ ID NO: 630 - RNA, 36 nt, synthetic construct
  misc_feature 1..36: note = Synthetic: CD274-1794
  source 1..36: mol_type = other RNA
tgtaaccaccctgttgtgaagcagccgaaaggctgc

SEQ ID NO: 631 - RNA, 36 nt, synthetic construct
  misc_feature 1..36: note = Synthetic: CD274-1795
  source 1..36: mol_type = other RNA
gtaaccaccctgttgtgatagcagccgaaaggctgc

SEQ ID NO: 632 - RNA, 36 nt, synthetic construct
  misc_feature 1..36: note = Synthetic: CD274-1806
  source 1..36: mol_type = other RNA
gttgtgataaccactattaagcagccgaaaggctgc

SEQ ID NO: 633 - RNA, 36 nt, synthetic construct
  misc_feature 1..36: note = Synthetic: CD274-1807
  source 1..36: mol_type = other RNA
ttgtgataaccactattatagcagccgaaaggctgc

SEQ ID NO: 634 - RNA, 36 nt, synthetic construct
  misc_feature 1..36: note = Synthetic: CD274-1808
  source 1..36: mol_type = other RNA
tgtgataaccactattattagcagccgaaaggctgc

SEQ ID NO: 635 - RNA, 36 nt, synthetic construct
  misc_feature 1..36: note = Synthetic: CD274-1809
  source 1..36: mol_type = other RNA
gtgataaccactattatttagcagccgaaaggctgc

SEQ ID NO: 636 - RNA, 36 nt, synthetic construct
  misc_feature 1..36: note = Synthetic: CD274-1810
  source 1..36: mol_type = other RNA
tgataaccactattattttagcagccgaaaggctgc

SEQ ID NO: 637 - RNA, 36 nt, synthetic construct
  misc_feature 1..36: note = Synthetic: CD274-1811
  source 1..36: mol_type = other RNA
gataaccactattattttaagcagccgaaaggctgc

SEQ ID NO: 638 - RNA, 36 nt, synthetic construct
  misc_feature 1..36: note = Synthetic: CD274-1812
  source 1..36: mol_type = other RNA
ataaccactattattttacagcagccgaaaggctgc

SEQ ID NO: 639 - RNA, 36 nt, synthetic construct
  misc_feature 1..36: note = Synthetic: CD274-1906
  source 1..36: mol_type = other RNA
ccactgtccttttataataagcagccgaaaggctgc

SEQ ID NO: 640 - RNA, 36 nt, synthetic construct
  misc_feature 1..36: note = Synthetic: CD274-1907
  source 1..36: mol_type = other RNA
cactgtccttttataatacagcagccgaaaggctgc

SEQ ID NO: 641 - RNA, 36 nt, synthetic construct
  misc_feature 1..36: note = Synthetic: CD274-1908
  source 1..36: mol_type = other RNA
actgtccttttataatacaagcagccgaaaggctgc

SEQ ID NO: 642 - RNA, 36 nt, synthetic construct
  misc_feature 1..36: note = Synthetic: CD274-1909
  source 1..36: mol_type = other RNA
ctgtccttttataatacaaagcagccgaaaggctgc

SEQ ID NO: 643 - RNA, 36 nt, synthetic construct
  misc_feature 1..36: note = Synthetic: CD274-1910
  source 1..36: mol_type = other RNA
tgtccttttataatacaatagcagccgaaaggctgc

SEQ ID NO: 644 - RNA, 36 nt, synthetic construct
  misc_feature 1..36: note = Synthetic: CD274-1913
  source 1..36: mol_type = other RNA
ccttttataatacaatttaagcagccgaaaggctgc

SEQ ID NO: 645 - RNA, 36 nt, synthetic construct
  misc_feature 1..36: note = Synthetic: CD274-1915
  source 1..36: mol_type = other RNA
ttttataatacaatttacaagcagccgaaaggctgc

SEQ ID NO: 646 - RNA, 36 nt, synthetic construct
  misc_feature 1..36: note = Synthetic: CD274-1919
  source 1..36: mol_type = other RNA
ataatacaatttacagctaagcagccgaaaggctgc

SEQ ID NO: 647 - RNA, 36 nt, synthetic construct
  misc_feature 1..36: note = Synthetic: CD274-1931
  source 1..36: mol_type = other RNA
acagctatattttactttaagcagccgaaaggctgc

SEQ ID NO: 648 - RNA, 36 nt, synthetic construct
  misc_feature 1..36: note = Synthetic: CD274-1935
  source 1..36: mol_type = other RNA
ctatattttactttaagcaagcagccgaaaggctgc

SEQ ID NO: 649 - RNA, 36 nt, synthetic construct
  misc_feature 1..36: note = Synthetic: CD274-1937
  source 1..36: mol_type = other RNA
atattttactttaagcaatagcagccgaaaggctgc

SEQ ID NO: 650 - RNA, 36 nt, synthetic construct
  misc_feature 1..36: note = Synthetic: CD274-2014
  source 1..36: mol_type = other RNA
attgaatctacagatgtgaagcagccgaaaggctgc

SEQ ID NO: 651 - RNA, 36 nt, synthetic construct
  misc_feature 1..36: note = Synthetic: CD274-2088
  source 1..36: mol_type = other RNA
gaaaatgtattattacaatagcagccgaaaggctgc

SEQ ID NO: 652 - RNA, 36 nt, synthetic construct
  misc_feature 1..36: note = Synthetic: CD274-2221
  source 1..36: mol_type = other RNA
ataatcagagtaattttcaagcagccgaaaggctgc

SEQ ID NO: 653 - RNA, 36 nt, synthetic construct
  misc_feature 1..36: note = Synthetic: CD274-2225
  source 1..36: mol_type = other RNA
tcagagtaattttcatttaagcagccgaaaggctgc

SEQ ID NO: 654 - RNA, 36 nt, synthetic construct
  misc_feature 1..36: note = Synthetic: CD274-2227
  source 1..36: mol_type = other RNA
agagtaattttcatttacaagcagccgaaaggctgc

SEQ ID NO: 655 - RNA, 36 nt, synthetic construct
  misc_feature 1..36: note = Synthetic: CD274-2228
  source 1..36: mol_type = other RNA
gagtaattttcatttacaaagcagccgaaaggctgc

SEQ ID NO: 656 - RNA, 36 nt, synthetic construct
  misc_feature 1..36: note = Synthetic: CD274-2229
  source 1..36: mol_type = other RNA
agtaattttcatttacaaaagcagccgaaaggctgc

SEQ ID NO: 657 - RNA, 36 nt, synthetic construct
  misc_feature 1..36: note = Synthetic: CD274-2231
  source 1..36: mol_type = other RNA
taattttcatttacaaagaagcagccgaaaggctgc

SEQ ID NO: 658 - RNA, 36 nt, synthetic construct
  misc_feature 1..36: note = Synthetic: CD274-2233
  source 1..36: mol_type = other RNA
attttcatttacaaagagaagcagccgaaaggctgc

SEQ ID NO: 659 - RNA, 36 nt, synthetic construct
  misc_feature 1..36: note = Synthetic: CD274-2263
  source 1..36: mol_type = other RNA
aaaataaccctgaaaaataagcagccgaaaggctgc

SEQ ID NO: 660 - RNA, 36 nt, synthetic construct
  misc_feature 1..36: note = Synthetic: CD274-2266
  source 1..36: mol_type = other RNA
ataaccctgaaaaataacaagcagccgaaaggctgc

SEQ ID NO: 661 - RNA, 36 nt, synthetic construct
  misc_feature 1..36: note = Synthetic: CD274-2333
  source 1..36: mol_type = other RNA
atataatctaatgcttgttagcagccgaaaggctgc

SEQ ID NO: 662 - RNA, 36 nt, synthetic construct
  misc_feature 1..36: note = Synthetic: CD274-2335
  source 1..36: mol_type = other RNA
ataatctaatgcttgtttaagcagccgaaaggctgc

SEQ ID NO: 663 - RNA, 36 nt, synthetic construct
  misc_feature 1..36: note = Synthetic: CD274-2337
  source 1..36: mol_type = other RNA
aatctaatgcttgtttataagcagccgaaaggctgc

SEQ ID NO: 664 - RNA, 36 nt, synthetic construct
  misc_feature 1..36: note = Synthetic: CD274-2338
  source 1..36: mol_type = other RNA
atctaatgcttgtttatatagcagccgaaaggctgc

SEQ ID NO: 665 - RNA, 36 nt, synthetic construct
  misc_feature 1..36: note = Synthetic: CD274-2339
  source 1..36: mol_type = other RNA
tctaatgcttgtttatataagcagccgaaaggctgc

SEQ ID NO: 666 - RNA, 36 nt, synthetic construct
  misc_feature 1..36: note = Synthetic: CD274-2341
  source 1..36: mol_type = other RNA
taatgcttgtttatatagtagcagccgaaaggctgc

SEQ ID NO: 667 - RNA, 36 nt, synthetic construct
  misc_feature 1..36: note = Synthetic: CD274-2343
  source 1..36: mol_type = other RNA
atgcttgtttatatagtgtagcagccgaaaggctgc

SEQ ID NO: 668 - RNA, 36 nt, synthetic construct
  misc_feature 1..36: note = Synthetic: CD274-2362
  source 1..36: mol_type = other RNA
ctggtattgtttaacagttagcagccgaaaggctgc

SEQ ID NO: 669 - RNA, 36 nt, synthetic construct
  misc_feature 1..36: note = Synthetic: CD274-2363
  source 1..36: mol_type = other RNA
tggtattgtttaacagttcagcagccgaaaggctgc

SEQ ID NO: 670 - RNA, 36 nt, synthetic construct
  misc_feature 1..36: note = Synthetic: CD274-2407
  source 1..36: mol_type = other RNA
aattttaaattcataccttagcagccgaaaggctgc

SEQ ID NO: 671 - RNA, 36 nt, synthetic construct
  misc_feature 1..36: note = Synthetic: CD274-2556
  source 1..36: mol_type = other RNA
agtctacatttggaaatgtagcagccgaaaggctgc

SEQ ID NO: 672 - RNA, 36 nt, synthetic construct
  misc_feature 1..36: note = Synthetic: CD274-2557
  source 1..36: mol_type = other RNA
gtctacatttggaaatgtaagcagccgaaaggctgc

SEQ ID NO: 673 - RNA, 36 nt, synthetic construct
  misc_feature 1..36: note = Synthetic: CD274-2561
  source 1..36: mol_type = other RNA
acatttggaaatgtatgttagcagccgaaaggctgc

SEQ ID NO: 674 - RNA, 36 nt, synthetic construct
  misc_feature 1..36: note = Synthetic: CD274-2562
  source 1..36: mol_type = other RNA
catttggaaatgtatgttaagcagccgaaaggctgc

SEQ ID NO: 675 - RNA, 36 nt, synthetic construct
  misc_feature 1..36: note = Synthetic: CD274-2563
  source 1..36: mol_type = other RNA
atttggaaatgtatgttaaagcagccgaaaggctgc

SEQ ID NO: 676 - RNA, 36 nt, synthetic construct
  misc_feature 1..36: note = Synthetic: CD274-2565
  source 1..36: mol_type = other RNA
ttggaaatgtatgttaaaaagcagccgaaaggctgc

SEQ ID NO: 677 - RNA, 36 nt, synthetic construct
  misc_feature 1..36: note = Synthetic: CD274-2568
  source 1..36: mol_type = other RNA
gaaatgtatgttaaaagcaagcagccgaaaggctgc

SEQ ID NO: 678 - RNA, 36 nt, synthetic construct
  misc_feature 1..36: note = Synthetic: CD274-2634
  source 1..36: mol_type = other RNA
ctgtgtactttgctattttagcagccgaaaggctgc

SEQ ID NO: 679 - RNA, 36 nt, synthetic construct
  misc_feature 1..36: note = Synthetic: CD274-2636
  source 1..36: mol_type = other RNA
gtgtactttgctatttttaagcagccgaaaggctgc

SEQ ID NO: 680 - RNA, 36 nt, synthetic construct
  misc_feature 1..36: note = Synthetic: CD274-2637
  source 1..36: mol_type = other RNA
tgtactttgctatttttatagcagccgaaaggctgc

SEQ ID NO: 681 - RNA, 36 nt, synthetic construct
  misc_feature 1..36: note = Synthetic: CD274-2640
  source 1..36: mol_type = other RNA
actttgctatttttatttaagcagccgaaaggctgc

SEQ ID NO: 682 - RNA, 36 nt, synthetic construct
  misc_feature 1..36: note = Synthetic: CD274-2673
  source 1..36: mol_type = other RNA
atatagcagatggaatgaaagcagccgaaaggctgc

SEQ ID NO: 683 - RNA, 36 nt, synthetic construct
  misc_feature 1..36: note = Synthetic: CD274-2678
  source 1..36: mol_type = other RNA
gcagatggaatgaatttgaagcagccgaaaggctgc

SEQ ID NO: 684 - RNA, 36 nt, synthetic construct
  misc_feature 1..36: note = Synthetic: CD274-2679
  source 1..36: mol_type = other RNA
cagatggaatgaatttgaaagcagccgaaaggctgc

SEQ ID NO: 685 - RNA, 36 nt, synthetic construct
  misc_feature 1..36: note = Synthetic: CD274-2801
  source 1..36: mol_type = other RNA
atatacatttagacaaccaagcagccgaaaggctgc

SEQ ID NO: 686 - RNA, 36 nt, synthetic construct
  misc_feature 1..36: note = Synthetic: CD274-2815
  source 1..36: mol_type = other RNA
aaccaccatttgttaagtaagcagccgaaaggctgc

SEQ ID NO: 687 - RNA, 36 nt, synthetic construct
  misc_feature 1..36: note = Synthetic: CD274-2819
  source 1..36: mol_type = other RNA
accatttgttaagtatttgagcagccgaaaggctgc

SEQ ID NO: 688 - RNA, 36 nt, synthetic construct
  misc_feature 1..36: note = Synthetic: CD274-2924
  source 1..36: mol_type = other RNA
aaaagcaatcttattattaagcagccgaaaggctgc

SEQ ID NO: 689 - RNA, 36 nt, synthetic construct
  misc_feature 1..36: note = Synthetic: CD274-2935
  source 1..36: mol_type = other RNA
tattattaactctgtatgaagcagccgaaaggctgc

SEQ ID NO: 690 - RNA, 36 nt, synthetic construct
  misc_feature 1..36: note = Synthetic: CD274-2936
  source 1..36: mol_type = other RNA
attattaactctgtatgacagcagccgaaaggctgc

SEQ ID NO: 691 - RNA, 36 nt, synthetic construct
  misc_feature 1..36: note = Synthetic: CD274-2937
  source 1..36: mol_type = other RNA
ttattaactctgtatgacaagcagccgaaaggctgc

SEQ ID NO: 692 - RNA, 36 nt, synthetic construct
  misc_feature 1..36: note = Synthetic: CD274-2939
  source 1..36: mol_type = other RNA
attaactctgtatgacagaagcagccgaaaggctgc

SEQ ID NO: 693 - RNA, 36 nt, synthetic construct
  misc_feature 1..36: note = Synthetic: CD274-2994
  source 1..36: mol_type = other RNA
agtataaacttcactttgaagcagccgaaaggctgc

SEQ ID NO: 694 - RNA, 36 nt, synthetic construct
  misc_feature 1..36: note = Synthetic: CD274-3015
  source 1..36: mol_type = other RNA
ctgtacttgcaaaatcacaagcagccgaaaggctgc

SEQ ID NO: 695 - RNA, 36 nt, synthetic construct
  misc_feature 1..36: note = Synthetic: CD274-3019
  source 1..36: mol_type = other RNA
acttgcaaaatcacattttagcagccgaaaggctgc

SEQ ID NO: 696 - RNA, 36 nt, synthetic construct
  misc_feature 1..36: note = Synthetic: CD274-3094
  source 1..36: mol_type = other RNA
cctcattcgttgtgcttgaagcagccgaaaggctgc

SEQ ID NO: 697 - RNA, 36 nt, synthetic construct
  misc_feature 1..36: note = Synthetic: CD274-3095
  source 1..36: mol_type = other RNA
ctcattcgttgtgcttgaaagcagccgaaaggctgc

SEQ ID NO: 698 - RNA, 36 nt, synthetic construct
  misc_feature 1..36: note = Synthetic: CD274-3305
  source 1..36: mol_type = other RNA
cttgtgttatctgtttgtaagcagccgaaaggctgc

SEQ ID NO: 699 - RNA, 36 nt, synthetic construct
  misc_feature 1..36: note = Synthetic: CD274-3306
  source 1..36: mol_type = other RNA
ttgtgttatctgtttgtacagcagccgaaaggctgc

SEQ ID NO: 700 - RNA, 36 nt, synthetic construct
  misc_feature 1..36: note = Synthetic: CD274-3307
  source 1..36: mol_type = other RNA
tgtgttatctgtttgtacaagcagccgaaaggctgc

SEQ ID NO: 701 - RNA, 36 nt, synthetic construct
  misc_feature 1..36: note = Synthetic: CD274-3308
  source 1..36: mol_type = other RNA
gtgttatctgtttgtacatagcagccgaaaggctgc

SEQ ID NO: 702 - RNA, 36 nt, synthetic construct
  misc_feature 1..36: note = Synthetic: CD274-3310
  source 1..36: mol_type = other RNA
gttatctgtttgtacatgtagcagccgaaaggctgc

SEQ ID NO: 703 - RNA, 36 nt, synthetic construct
  misc_feature 1..36: note = Synthetic: CD274-3319
  source 1..36: mol_type = other RNA
ttgtacatgtgcatttgtaagcagccgaaaggctgc

SEQ ID NO: 704 - RNA, 36 nt, synthetic construct
  misc_feature 1..36: note = Synthetic: CD274-3325
  source 1..36: mol_type = other RNA
atgtgcatttgtacagtaaagcagccgaaaggctgc

SEQ ID NO: 705 - RNA, 36 nt, synthetic construct
  misc_feature 1..36: note = Synthetic: CD274-3355
  source 1..36: mol_type = other RNA
gtgttctttgtgtgaattaagcagccgaaaggctgc

SEQ ID NO: 706 - RNA, 36 nt, synthetic construct
  misc_feature 1..36: note = Synthetic: CD274-3357
  source 1..36: mol_type = other RNA
gttctttgtgtgaattacaagcagccgaaaggctgc

SEQ ID NO: 707 - RNA, 36 nt, synthetic construct
  misc_feature 1..36: note = Synthetic: CD274-3441
  source 1..36: mol_type = other RNA
ttgtggtgttggatttgtaagcagccgaaaggctgc

SEQ ID NO: 708 - RNA, 36 nt, synthetic construct
  misc_feature 1..36: note = Synthetic: CD274-3522
  source 1..36: mol_type = other RNA
attctgcatttgattgtcaagcagccgaaaggctgc

SEQ ID NO: 709 - RNA, 36 nt, synthetic construct
  misc_feature 1..36: note = Synthetic: CD274-3528
  source 1..36: mol_type = other RNA
catttgattgtcactttttagcagccgaaaggctgc

SEQ ID NO: 710 - RNA, 36 nt, synthetic construct
  misc_feature 1..36: note = Synthetic: CD274-3531
  source 1..36: mol_type = other RNA
ttgattgtcactttttgtaagcagccgaaaggctgc

SEQ ID NO: 711 - RNA, 36 nt, synthetic construct
  misc_feature 1..36: note = Synthetic: CD274-3532
  source 1..36: mol_type = other RNA
tgattgtcactttttgtacagcagccgaaaggctgc

SEQ ID NO: 712 - RNA, 36 nt, synthetic construct
  misc_feature 1..36: note = Synthetic: CD274-3534
  source 1..36: mol_type = other RNA
attgtcactttttgtacctagcagccgaaaggctgc

SEQ ID NO: 713 - RNA, 36 nt, synthetic construct
  misc_feature 1..36: note = Synthetic: CD274-3541
  source 1..36: mol_type = other RNA
ctttttgtacctgcattaaagcagccgaaaggctgc

SEQ ID NO: 714 - RNA, 36 nt, synthetic construct
  misc_feature 1..36: note = Synthetic: CD274-3542
  source 1..36: mol_type = other RNA
tttttgtacctgcattaatagcagccgaaaggctgc

SEQ ID NO: 715 - RNA, 36 nt, synthetic construct
  misc_feature 1..36: note = Synthetic: CD274-3545
  source 1..36: mol_type = other RNA
ttgtacctgcattaatttaagcagccgaaaggctgc

SEQ ID NO: 716 - RNA, 36 nt, synthetic construct
  misc_feature 1..36: note = Synthetic: CD274-3546
  source 1..36: mol_type = other RNA
tgtacctgcattaatttaaagcagccgaaaggctgc

SEQ ID NO: 717 - RNA, 36 nt, synthetic construct
  misc_feature 1..36: note = Synthetic: CD274-3569
  source 1..36: mol_type = other RNA
atattcttatttattttgtagcagccgaaaggctgc

SEQ ID NO: 718 - RNA, 36 nt, synthetic construct
  misc_feature 1..36: note = Synthetic: CD274-3577
  source 1..36: mol_type = other RNA
atttattttgttacttggtagcagccgaaaggctgc

SEQ ID NO: 719 - RNA, 36 nt, synthetic construct
  misc_feature 1..36: note = Synthetic: CD274-3578
  source 1..36: mol_type = other RNA
tttattttgttacttggtaagcagccgaaaggctgc

SEQ ID NO: 720 - RNA, 36 nt, synthetic construct
  misc_feature 1..36: note = Synthetic: CD274-3580
  source 1..36: mol_type = other RNA
tattttgttacttggtacaagcagccgaaaggctgc

SEQ ID NO: 721 - RNA, 36 nt, synthetic construct
  misc_feature 1..36: note = Synthetic: CD274-3604
  source 1..36: mol_type = other RNA
atgtccattttcttgtttaagcagccgaaaggctgc

SEQ ID NO: 722 - RNA, 36 nt, synthetic construct
  misc_feature 1..36: note = Synthetic: CD274-3610
  source 1..36: mol_type = other RNA
attttcttgtttattttgtagcagccgaaaggctgc

SEQ ID NO: 723 - RNA, 36 nt, synthetic construct
  misc_feature 1..36: note = Synthetic: CD274-3622
  source 1..36: mol_type = other RNA
attttgtgtttaataaaatagcagccgaaaggctgc

SEQ ID NO: 724 - RNA, 22 nt, synthetic construct
  misc_feature 1..22: note = Synthetic: CD274-0088
  source 1..22: mol_type = other RNA
tcaaatatcctcatctttctgg

SEQ ID NO: 725 - RNA, 22 nt, synthetic construct
  misc_feature 1..22: note = Synthetic: CD274-0094
  source 1..22: mol_type = other RNA
tagacagcaaatatcctcatgg

SEQ ID NO: 726 - skipped

SEQ ID NO: 727 - RNA, 22 nt, synthetic construct
  misc_feature 1..22: note = Synthetic: CD274-0097
  source 1..22: mol_type = other RNA
ttaaagacagcaaatatcctgg

SEQ ID NO: 728 - RNA, 22 nt, synthetic construct
  misc_feature 1..22: note = Synthetic: CD274-0098
  source 1..22: mol_type = other RNA
tataaagacagcaaatatccgg

SEQ ID NO: 729 - RNA, 22 nt, synthetic construct
  misc_feature 1..22: note = Synthetic: CD274-0100
  source 1..22: mol_type = other RNA
tatataaagacagcaaatatgg

SEQ ID NO: 730 - RNA, 22 nt, synthetic construct
  misc_feature 1..22: note = Synthetic: CD274-0102
  source 1..22: mol_type = other RNA
tgaatataaagacagcaaatgg

SEQ ID NO: 731 - RNA, 22 nt, synthetic construct
  misc_feature 1..22: note = Synthetic: CD274-0167
  source 1..22: mol_type = other RNA
ttctaccacatataggtcctgg

SEQ ID NO: 732 - RNA, 22 nt, synthetic construct
  misc_feature 1..22: note = Synthetic: CD274-0193
  source 1..22: mol_type = other RNA
tattcaattgtcatattgctgg

SEQ ID NO: 733 - RNA, 22 nt, synthetic construct
  misc_feature 1..22: note = Synthetic: CD274-0194
  source 1..22: mol_type = other RNA
tcattcaattgtcatattgcgg

SEQ ID NO: 734 - RNA, 22 nt, synthetic construct
  misc_feature 1..22: note = Synthetic: CD274-0197
  source 1..22: mol_type = other RNA
tttgcattcaattgtcatatgg

SEQ ID NO: 735 - RNA, 22 nt, synthetic construct
  misc_feature 1..22: note = Synthetic: CD274-0200
  source 1..22: mol_type = other RNA
taatttgcattcaattgtcagg

SEQ ID NO: 736 - RNA, 22 nt, synthetic construct
  misc_feature 1..22: note = Synthetic: CD274-0204
  source 1..22: mol_type = other RNA
ttgggaatttgcattcaattgg

SEQ ID NO: 737 - RNA, 22 nt, synthetic construct
  misc_feature 1..22: note = Synthetic: CD274-0219
  source 1..22: mol_type = other RNA
ttaattgtttttctactggggg

SEQ ID NO: 738 - RNA, 22 nt, synthetic construct
  misc_feature 1..22: note = Synthetic: CD274-0222
  source 1..22: mol_type = other RNA
tgtctaattgtttttctactgg

SEQ ID NO: 739 - RNA, 22 nt, synthetic construct
  misc_feature 1..22: note = Synthetic: CD274-0225
  source 1..22: mol_type = other RNA
tcaggtctaattgtttttctgg

SEQ ID NO: 740 - RNA, 22 nt, synthetic construct
  misc_feature 1..22: note = Synthetic: CD274-0268
  source 1..22: mol_type = other RNA
ttaatgttcttatcctccatgg

SEQ ID NO: 741 - RNA, 22 nt, synthetic construct
  misc_feature 1..22: note = Synthetic: CD274-0269
  source 1..22: mol_type = other RNA
tataatgttcttatcctccagg

SEQ ID NO: 742 - RNA, 22 nt, synthetic construct
  misc_feature 1..22: note = Synthetic: CD274-0271
  source 1..22: mol_type = other RNA
tgaataatgttcttatcctcgg

SEQ ID NO: 743 - RNA, 22 nt, synthetic construct
  misc_feature 1..22: note = Synthetic: CD274-0274
  source 1..22: mol_type = other RNA
tattgaataatgttcttatcgg

SEQ ID NO: 744 - RNA, 22 nt, synthetic construct
  misc_feature 1..22: note = Synthetic: CD274-0275
  source 1..22: mol_type = other RNA
taattgaataatgttcttatgg

SEQ ID NO: 745 - RNA, 22 nt, synthetic construct
  misc_feature 1..22: note = Synthetic: CD274-0277
  source 1..22: mol_type = other RNA
tcaaattgaataatgttcttgg

SEQ ID NO: 746 - RNA, 22 nt, synthetic construct
  misc_feature 1..22: note = Synthetic: CD274-0282
  source 1..22: mol_type = other RNA
tatgcacaaattgaataatggg

SEQ ID NO: 747 - RNA, 22 nt, synthetic construct
  misc_feature 1..22: note = Synthetic: CD274-0283
  source 1..22: mol_type = other RNA
tcatgcacaaattgaataatgg

SEQ ID NO: 748 - RNA, 22 nt, synthetic construct
  misc_feature 1..22: note = Synthetic: CD274-0394
  source 1..22: mol_type = other RNA
tgcaatttcacatctgtgatgg

SEQ ID NO: 749 - RNA, 22 nt, synthetic construct
  misc_feature 1..22: note = Synthetic: CD274-0399
  source 1..22: mol_type = other RNA
tatcctgcaatttcacatctgg

SEQ ID NO: 750 - RNA, 22 nt, synthetic construct
  misc_feature 1..22: note = Synthetic: CD274-0530
  source 1..22: mol_type = other RNA
ttcatgttcagaggtgactggg

SEQ ID NO: 751 - RNA, 22 nt, synthetic construct
  misc_feature 1..22: note = Synthetic: CD274-0531
  source 1..22: mol_type = other RNA
tttcatgttcagaggtgactgg

SEQ ID NO: 752 - RNA, 22 nt, synthetic construct
  misc_feature 1..22: note = Synthetic: CD274-0653
  source 1..22: mol_type = other RNA
tacattgaaaagcttctcctgg

SEQ ID NO: 753 - RNA, 22 nt, synthetic construct
  misc_feature 1..22: note = Synthetic: CD274-0673
  source 1..22: mol_type = other RNA
ttgattctcagtgtgctggtgg

SEQ ID NO: 754 - RNA, 22 nt, synthetic construct
  misc_feature 1..22: note = Synthetic: CD274-0693
  source 1..22: mol_type = other RNA
taatctcattagttgttgtggg

SEQ ID NO: 755 - RNA, 22 nt, synthetic construct
  misc_feature 1..22: note = Synthetic: CD274-0697
  source 1..22: mol_type = other RNA
tagaaaatctcattagttgtgg

SEQ ID NO: 756 - RNA, 22 nt, synthetic construct
  misc_feature 1..22: note = Synthetic: CD274-0700
  source 1..22: mol_type = other RNA
tagtagaaaatctcattagtgg

SEQ ID NO: 757 - RNA, 22 nt, synthetic construct
  misc_feature 1..22: note = Synthetic: CD274-0701
  source 1..22: mol_type = other RNA
tcagtagaaaatctcattaggg

SEQ ID NO: 758 - RNA, 22 nt, synthetic construct
  misc_feature 1..22: note = Synthetic: CD274-0743
  source 1..22: mol_type = other RNA
ttcagctgtatggttttcctgg

SEQ ID NO: 759 - RNA, 22 nt, synthetic construct
  misc_feature 1..22: note = Synthetic: CD274-0746
  source 1..22: mol_type = other RNA
taattcagctgtatggttttgg

SEQ ID NO: 760 - RNA, 22 nt, synthetic construct
  misc_feature 1..22: note = Synthetic: CD274-0095
  source 1..22: mol_type = other RNA
taagacagcaaatatcctcagg

SEQ ID NO: 761 - RNA, 22 nt, synthetic construct
  misc_feature 1..22: note = Synthetic: CD274-0099
  source 1..22: mol_type = other RNA
ttataaagacagcaaatatcgg

SEQ ID NO: 762 - RNA, 22 nt, synthetic construct
  misc_feature 1..22: note = Synthetic: CD274-0103
  source 1..22: mol_type = other RNA
ttgaatataaagacagcaaagg

SEQ ID NO: 763 - RNA, 22 nt, synthetic construct
  misc_feature 1..22: note = Synthetic: CD274-0195
  source 1..22: mol_type = other RNA
tgcattcaattgtcatattggg

SEQ ID NO: 764 - RNA, 22 nt, synthetic construct
  misc_feature 1..22: note = Synthetic: CD274-0196
  source 1..22: mol_type = other RNA
ttgcattcaattgtcatattgg

SEQ ID NO: 765 - RNA, 22 nt, synthetic construct
  misc_feature 1..22: note = Synthetic: CD274-0198
  source 1..22: mol_type = other RNA
ttttgcattcaattgtcatagg

SEQ ID NO: 766 - RNA, 22 nt, synthetic construct
  misc_feature 1..22: note = Synthetic: CD274-0199
  source 1..22: mol_type = other RNA
tatttgcattcaattgtcatgg

SEQ ID NO: 767 - RNA, 22 nt, synthetic construct
  misc_feature 1..22: note = Synthetic: CD274-0201
  source 1..22: mol_type = other RNA
tgaatttgcattcaattgtcgg

SEQ ID NO: 768 - RNA, 22 nt, synthetic construct
  misc_feature 1..22: note = Synthetic: CD274-0202
  source 1..22: mol_type = other RNA
tggaatttgcattcaattgtgg

SEQ ID NO: 769 - RNA, 22 nt, synthetic construct
  misc_feature 1..22: note = Synthetic: CD274-0207
  source 1..22: mol_type = other RNA
ttactgggaatttgcattcagg

SEQ ID NO: 770 - RNA, 22 nt, synthetic construct
  misc_feature 1..22: note = Synthetic: CD274-0221
  source 1..22: mol_type = other RNA
ttctaattgtttttctactggg

SEQ ID NO: 771 - RNA, 22 nt, synthetic construct
  misc_feature 1..22: note = Synthetic: CD274-0245
  source 1..22: mol_type = other RNA
tcaatagacaattagtgcaggg

SEQ ID NO: 772 - RNA, 22 nt, synthetic construct
  misc_feature 1..22: note = Synthetic: CD274-0248
  source 1..22: mol_type = other RNA
ttcccaatagacaattagtggg

SEQ ID NO: 773 - RNA, 22 nt, synthetic construct
  misc_feature 1..22: note = Synthetic: CD274-0249
  source 1..22: mol_type = other RNA
tttcccaatagacaattagtgg

SEQ ID NO: 774 - RNA, 22 nt, synthetic construct
  misc_feature 1..22: note = Synthetic: CD274-0265
  source 1..22: mol_type = other RNA
ttgttcttatcctccatttcgg

SEQ ID NO: 775 - RNA, 22 nt, synthetic construct
  misc_feature 1..22: note = Synthetic: CD274-0266
  source 1..22: mol_type = other RNA
tatgttcttatcctccatttgg

SEQ ID NO: 776 - RNA, 22 nt, synthetic construct
  misc_feature 1..22: note = Synthetic: CD274-0267
  source 1..22: mol_type = other RNA
taatgttcttatcctccattgg

SEQ ID NO: 777 - RNA, 22 nt, synthetic construct
  misc_feature 1..22: note = Synthetic: CD274-0270
  source 1..22: mol_type = other RNA
taataatgttcttatcctccgg

SEQ ID NO: 778 - RNA, 22 nt, synthetic construct
  misc_feature 1..22: note = Synthetic: CD274-0272
  source 1..22: mol_type = other RNA
ttgaataatgttcttatcctgg

SEQ ID NO: 779 - RNA, 22 nt, synthetic construct
  misc_feature 1..22: note = Synthetic: CD274-0273
  source 1..22: mol_type = other RNA
tttgaataatgttcttatccgg

SEQ ID NO: 780 - RNA, 22 nt, synthetic construct
  misc_feature 1..22: note = Synthetic: CD274-0276
  source 1..22: mol_type = other RNA
taaattgaataatgttcttagg

SEQ ID NO: 781 - RNA, 22 nt, synthetic construct
  misc_feature 1..22: note = Synthetic: CD274-0278
  source 1..22: mol_type = other RNA
tacaaattgaataatgttctgg

SEQ ID NO: 782 - RNA, 22 nt, synthetic construct
  misc_feature 1..22: note = Synthetic: CD274-0279
  source 1..22: mol_type = other RNA
tcacaaattgaataatgttcgg

SEQ ID NO: 783 - RNA, 22 nt, synthetic construct
  misc_feature 1..22: note = Synthetic: CD274-0280
  source 1..22: mol_type = other RNA
tgcacaaattgaataatgttgg

SEQ ID NO: 784 - RNA, 22 nt, synthetic construct
  misc_feature 1..22: note = Synthetic: CD274-0281
  source 1..22: mol_type = other RNA
ttgcacaaattgaataatgtgg

SEQ ID NO: 785 - RNA, 22 nt, synthetic construct
  misc_feature 1..22: note = Synthetic: CD274-0285
  source 1..22: mol_type = other RNA
ttccatgcacaaattgaatagg

SEQ ID NO: 786 - RNA, 22 nt, synthetic construct
  misc_feature 1..22: note = Synthetic: CD274-0303
  source 1..22: mol_type = other RNA
taaccttcaggtcttcctctgg

SEQ ID NO: 787 - RNA, 22 nt, synthetic construct
  misc_feature 1..22: note = Synthetic: CD274-0305
  source 1..22: mol_type = other RNA
ttgaaccttcaggtcttcctgg

SEQ ID NO: 788 - RNA, 22 nt, synthetic construct
  misc_feature 1..22: note = Synthetic: CD274-0308
  source 1..22: mol_type = other RNA
ttgctgaaccttcaggtcttgg

SEQ ID NO: 789 - RNA, 22 nt, synthetic construct
  misc_feature 1..22: note = Synthetic: CD274-0309
  source 1..22: mol_type = other RNA
tatgctgaaccttcaggtctgg

SEQ ID NO: 790 - RNA, 22 nt, synthetic construct
  misc_feature 1..22: note = Synthetic: CD274-0310
  source 1..22: mol_type = other RNA
ttatgctgaaccttcaggtcgg

SEQ ID NO: 791 - RNA, 22 nt, synthetic construct
  misc_feature 1..22: note = Synthetic: CD274-0312
  source 1..22: mol_type = other RNA
tactatgctgaaccttcagggg

SEQ ID NO: 792 - RNA, 22 nt, synthetic construct
  misc_feature 1..22: note = Synthetic: CD274-0313
  source 1..22: mol_type = other RNA
ttactatgctgaaccttcaggg

SEQ ID NO: 793 - RNA, 22 nt, synthetic construct
  misc_feature 1..22: note = Synthetic: CD274-0392
  source 1..22: mol_type = other RNA
taatttcacatctgtgatctgg

SEQ ID NO: 794 - RNA, 22 nt, synthetic construct
  misc_feature 1..22: note = Synthetic: CD274-0395
  source 1..22: mol_type = other RNA
ttgcaatttcacatctgtgagg

SEQ ID NO: 795 - RNA, 22 nt, synthetic construct
  misc_feature 1..22: note = Synthetic: CD274-0398
  source 1..22: mol_type = other RNA
ttcctgcaatttcacatctggg

SEQ ID NO: 796 - RNA, 22 nt, synthetic construct
  misc_feature 1..22: note = Synthetic: CD274-0497
  source 1..22: mol_type = other RNA
tattctttggttgattttgtgg

SEQ ID NO: 797 - RNA, 22 nt, synthetic construct
  misc_feature 1..22: note = Synthetic: CD274-0499
  source 1..22: mol_type = other RNA
taaattctttggttgattttgg

SEQ ID NO: 798 - RNA, 22 nt, synthetic construct
  misc_feature 1..22: note = Synthetic: CD274-0500
  source 1..22: mol_type = other RNA
taaaattctttggttgatttgg

SEQ ID NO: 799 - RNA, 22 nt, synthetic construct
  misc_feature 1..22: note = Synthetic: CD274-0501
  source 1..22: mol_type = other RNA
tcaaaattctttggttgattgg

SEQ ID NO: 800 - RNA, 22 nt, synthetic construct
  misc_feature 1..22: note = Synthetic: CD274-0502
  source 1..22: mol_type = other RNA
tccaaaattctttggttgatgg

SEQ ID NO: 801 - RNA, 22 nt, synthetic construct
  misc_feature 1..22: note = Synthetic: CD274-0504
  source 1..22: mol_type = other RNA
taaccaaaattctttggttggg

SEQ ID NO: 802 - RNA, 22 nt, synthetic construct
  misc_feature 1..22: note = Synthetic: CD274-0505
  source 1..22: mol_type = other RNA
tcaaccaaaattctttggttgg

SEQ ID NO: 803 - RNA, 22 nt, synthetic construct
  misc_feature 1..22: note = Synthetic: CD274-0506
  source 1..22: mol_type = other RNA
tacaaccaaaattctttggtgg

SEQ ID NO: 804 - RNA, 22 nt, synthetic construct
  misc_feature 1..22: note = Synthetic: CD274-0507
  source 1..22: mol_type = other RNA
tcacaaccaaaattctttgggg

SEQ ID NO: 805 - RNA, 22 nt, synthetic construct
  misc_feature 1..22: note = Synthetic: CD274-0509
  source 1..22: mol_type = other RNA
ttccacaaccaaaattctttgg

SEQ ID NO: 806 - RNA, 22 nt, synthetic construct
  misc_feature 1..22: note = Synthetic: CD274-0510
  source 1..22: mol_type = other RNA
tatccacaaccaaaattcttgg

SEQ ID NO: 807 - RNA, 22 nt, synthetic construct
  misc_feature 1..22: note = Synthetic: CD274-0511
  source 1..22: mol_type = other RNA
tgatccacaaccaaaattctgg

SEQ ID NO: 808 - RNA, 22 nt, synthetic construct
  misc_feature 1..22: note = Synthetic: CD274-0513
  source 1..22: mol_type = other RNA
ttggatccacaaccaaaattgg

SEQ ID NO: 809 - RNA, 22 nt, synthetic construct
  misc_feature 1..22: note = Synthetic: CD274-0535
  source 1..22: mol_type = other RNA
ttcagttcatgttcagaggtgg

SEQ ID NO: 810 - RNA, 22 nt, synthetic construct
  misc_feature 1..22: note = Synthetic: CD274-0537
  source 1..22: mol_type = other RNA
ttgtcagttcatgttcagaggg

SEQ ID NO: 811 - RNA, 22 nt, synthetic construct
  misc_feature 1..22: note = Synthetic: CD274-0542
  source 1..22: mol_type = other RNA
ttgacatgtcagttcatgttgg

SEQ ID NO: 812 - RNA, 22 nt, synthetic construct
  misc_feature 1..22: note = Synthetic: CD274-0583
  source 1..22: mol_type = other RNA
ttgcttgtccagatgacttcgg

SEQ ID NO: 813 - RNA, 22 nt, synthetic construct
  misc_feature 1..22: note = Synthetic: CD274-0594
  source 1..22: mol_type = other RNA
tttgatggtcactgcttgtcgg

SEQ ID NO: 814 - RNA, 22 nt, synthetic construct
  misc_feature 1..22: note = Synthetic: CD274-0601
  source 1..22: mol_type = other RNA
ttcaggacttgatggtcactgg

SEQ ID NO: 815 - RNA, 22 nt, synthetic construct
  misc_feature 1..22: note = Synthetic: CD274-0654
  source 1..22: mol_type = other RNA
tcacattgaaaagcttctccgg

SEQ ID NO: 816 - RNA, 22 nt, synthetic construct
  misc_feature 1..22: note = Synthetic: CD274-0655
  source 1..22: mol_type = other RNA
ttcacattgaaaagcttctcgg

SEQ ID NO: 817 - RNA, 22 nt, synthetic construct
  misc_feature 1..22: note = Synthetic: CD274-0656
  source 1..22: mol_type = other RNA
tgtcacattgaaaagcttctgg

SEQ ID NO: 818 - RNA, 22 nt, synthetic construct
  misc_feature 1..22: note = Synthetic: CD274-0658
  source 1..22: mol_type = other RNA
ttggtcacattgaaaagcttgg

SEQ ID NO: 819 - RNA, 22 nt, synthetic construct
  misc_feature 1..22: note = Synthetic: CD274-0661
  source 1..22: mol_type = other RNA
ttgctggtcacattgaaaaggg

SEQ ID NO: 820 - RNA, 22 nt, synthetic construct
  misc_feature 1..22: note = Synthetic: CD274-0667
  source 1..22: mol_type = other RNA
ttcagtgtgctggtcacattgg

SEQ ID NO: 821 - RNA, 22 nt, synthetic construct
  misc_feature 1..22: note = Synthetic: CD274-0676
  source 1..22: mol_type = other RNA
ttgttgattctcagtgtgctgg

SEQ ID NO: 822 - RNA, 22 nt, synthetic construct
  misc_feature 1..22: note = Synthetic: CD274-0679
  source 1..22: mol_type = other RNA
tttgtgttgattctcagtgtgg

SEQ ID NO: 823 - RNA, 22 nt, synthetic construct
  misc_feature 1..22: note = Synthetic: CD274-0681
  source 1..22: mol_type = other RNA
ttgttgtgttgattctcagtgg

SEQ ID NO: 824 - RNA, 22 nt, synthetic construct
  misc_feature 1..22: note = Synthetic: CD274-0685
  source 1..22: mol_type = other RNA
ttagttgttgtgttgattctgg

SEQ ID NO: 825 - RNA, 22 nt, synthetic construct
  misc_feature 1..22: note = Synthetic: CD274-0692
  source 1..22: mol_type = other RNA
tatctcattagttgttgtgtgg

SEQ ID NO: 826 - RNA, 22 nt, synthetic construct
  misc_feature 1..22: note = Synthetic: CD274-0695
  source 1..22: mol_type = other RNA
taaaatctcattagttgttggg

SEQ ID NO: 827 - RNA, 22 nt, synthetic construct
  misc_feature 1..22: note = Synthetic: CD274-0696
  source 1..22: mol_type = other RNA
tgaaaatctcattagttgttgg

SEQ ID NO: 828 - RNA, 22 nt, synthetic construct
  misc_feature 1..22: note = Synthetic: CD274-0698
  source 1..22: mol_type = other RNA
ttagaaaatctcattagttggg

SEQ ID NO: 829 - RNA, 22 nt, synthetic construct
  misc_feature 1..22: note = Synthetic: CD274-0703
  source 1..22: mol_type = other RNA
ttgcagtagaaaatctcattgg

SEQ ID NO: 830 - RNA, 22 nt, synthetic construct
  misc_feature 1..22: note = Synthetic: CD274-0709
  source 1..22: mol_type = other RNA
ttaaaagtgcagtagaaaatgg

SEQ ID NO: 831 - RNA, 22 nt, synthetic construct
  misc_feature 1..22: note = Synthetic: CD274-0745
  source 1..22: mol_type = other RNA
tattcagctgtatggttttcgg

SEQ ID NO: 832 - RNA, 22 nt, synthetic construct
  misc_feature 1..22: note = Synthetic: CD274-0749
  source 1..22: mol_type = other RNA
taccaattcagctgtatggtgg

SEQ ID NO: 833 - RNA, 22 nt, synthetic construct
  misc_feature 1..22: note = Synthetic: CD274-0752
  source 1..22: mol_type = other RNA
tatgaccaattcagctgtatgg

SEQ ID NO: 834 - RNA, 22 nt, synthetic construct
  misc_feature 1..22: note = Synthetic: CD274-0800
  source 1..22: mol_type = other RNA
taccaagtgagtcctttcatgg

SEQ ID NO: 835 - RNA, 22 nt, synthetic construct
  misc_feature 1..22: note = Synthetic: CD274-0804
  source 1..22: mol_type = other RNA
taattaccaagtgagtccttgg

SEQ ID NO: 836 - RNA, 22 nt, synthetic construct
  misc_feature 1..22: note = Synthetic: CD274-0847
  source 1..22: mol_type = other RNA
ttgaatgtcagtgctacaccgg

SEQ ID NO: 837 - RNA, 22 nt, synthetic construct
  misc_feature 1..22: note = Synthetic: CD274-0852
  source 1..22: mol_type = other RNA
tgaagatgaatgtcagtgctgg

SEQ ID NO: 838 - RNA, 22 nt, synthetic construct
  misc_feature 1..22: note = Synthetic: CD274-0889
  source 1..22: mol_type = other RNA
tattttttcacatccatcatgg

SEQ ID NO: 839 - RNA, 22 nt, synthetic construct
  misc_feature 1..22: note = Synthetic: CD274-1172
  source 1..22: mol_type = other RNA
ttgaaagtatcaaggtctccgg

SEQ ID NO: 840 - RNA, 22 nt, synthetic construct
  misc_feature 1..22: note = Synthetic: CD274-1173
  source 1..22: mol_type = other RNA
tttgaaagtatcaaggtctcgg

SEQ ID NO: 841 - RNA, 22 nt, synthetic construct
  misc_feature 1..22: note = Synthetic: CD274-1174
  source 1..22: mol_type = other RNA
ttttgaaagtatcaaggtctgg

SEQ ID NO: 842 - RNA, 22 nt, synthetic construct
  misc_feature 1..22: note = Synthetic: CD274-1176
  source 1..22: mol_type = other RNA
tcatttgaaagtatcaaggtgg

SEQ ID NO: 843 - RNA, 22 nt, synthetic construct
  misc_feature 1..22: note = Synthetic: CD274-1178
  source 1..22: mol_type = other RNA
tggcatttgaaagtatcaaggg

SEQ ID NO: 844 - RNA, 22 nt, synthetic construct
  misc_feature 1..22: note = Synthetic: CD274-1227
  source 1..22: mol_type = other RNA
ttgttcagaagtatcctttcgg

SEQ ID NO: 845 - RNA, 22 nt, synthetic construct
  misc_feature 1..22: note = Synthetic: CD274-1231
  source 1..22: mol_type = other RNA
ttccttgttcagaagtatccgg

SEQ ID NO: 846 - RNA, 22 nt, synthetic construct
  misc_feature 1..22: note = Synthetic: CD274-1423
  source 1..22: mol_type = other RNA
tacagactcaaaataaataggg

SEQ ID NO: 847 - RNA, 22 nt, synthetic construct
  misc_feature 1..22: note = Synthetic: CD274-1425
  source 1..22: mol_type = other RNA
ttcacagactcaaaataaatgg

SEQ ID NO: 848 - RNA, 22 nt, synthetic construct
  misc_feature 1..22: note = Synthetic: CD274-1459
  source 1..22: mol_type = other RNA
ttcattcacaaccacactcagg

SEQ ID NO: 849 - RNA, 22 nt, synthetic construct
  misc_feature 1..22: note = Synthetic: CD274-1460
  source 1..22: mol_type = other RNA
tatcattcacaaccacactcgg

SEQ ID NO: 850 - RNA, 22 nt, synthetic construct
  misc_feature 1..22: note = Synthetic: CD274-1461
  source 1..22: mol_type = other RNA
taatcattcacaaccacactgg

SEQ ID NO: 851 - RNA, 22 nt, synthetic construct
  misc_feature 1..22: note = Synthetic: CD274-1462
  source 1..22: mol_type = other RNA
taaatcattcacaaccacacgg

SEQ ID NO: 852 - RNA, 22 nt, synthetic construct
  misc_feature 1..22: note = Synthetic: CD274-1463
  source 1..22: mol_type = other RNA
tgaaatcattcacaaccacagg

SEQ ID NO: 853 - RNA, 22 nt, synthetic construct
  misc_feature 1..22: note = Synthetic: CD274-1464
  source 1..22: mol_type = other RNA
tagaaatcattcacaaccacgg

SEQ ID NO: 854 - RNA, 22 nt, synthetic construct
  misc_feature 1..22: note = Synthetic: CD274-1465
  source 1..22: mol_type = other RNA
taagaaatcattcacaaccagg

SEQ ID NO: 855 - RNA, 22 nt, synthetic construct
  misc_feature 1..22: note = Synthetic: CD274-1467
  source 1..22: mol_type = other RNA
taaaagaaatcattcacaacgg

SEQ ID NO: 856 - RNA, 22 nt, synthetic construct
  misc_feature 1..22: note = Synthetic: CD274-1469
  source 1..22: mol_type = other RNA
ttcaaaagaaatcattcacagg

SEQ ID NO: 857 - RNA, 22 nt, synthetic construct
  misc_feature 1..22: note = Synthetic: CD274-1470
  source 1..22: mol_type = other RNA
tttcaaaagaaatcattcacgg

SEQ ID NO: 858 - RNA, 22 nt, synthetic construct
  misc_feature 1..22: note = Synthetic: CD274-1473
  source 1..22: mol_type = other RNA
tatcttcaaaagaaatcattgg

SEQ ID NO: 859 - RNA, 22 nt, synthetic construct
  misc_feature 1..22: note = Synthetic: CD274-1474
  source 1..22: mol_type = other RNA
ttatcttcaaaagaaatcatgg

SEQ ID NO: 860 - RNA, 22 nt, synthetic construct
  misc_feature 1..22: note = Synthetic: CD274-1481
  source 1..22: mol_type = other RNA
ttacaatatatcttcaaaaggg

SEQ ID NO: 861 - RNA, 22 nt, synthetic construct
  misc_feature 1..22: note = Synthetic: CD274-1484
  source 1..22: mol_type = other RNA
ttactacaatatatcttcaagg

SEQ ID NO: 862 - RNA, 22 nt, synthetic construct
  misc_feature 1..22: note = Synthetic: CD274-1486
  source 1..22: mol_type = other RNA
ttctactacaatatatcttcgg

SEQ ID NO: 863 - RNA, 22 nt, synthetic construct
  misc_feature 1..22: note = Synthetic: CD274-1499
  source 1..22: mol_type = other RNA
tcaaaattgtaacatctactgg

SEQ ID NO: 864 - RNA, 22 nt, synthetic construct
  misc_feature 1..22: note = Synthetic: CD274-1500
  source 1..22: mol_type = other RNA
tacaaaattgtaacatctacgg

SEQ ID NO: 865 - RNA, 22 nt, synthetic construct
  misc_feature 1..22: note = Synthetic: CD274-1541
  source 1..22: mol_type = other RNA
ttagatgtgagcaaatcattgg

SEQ ID NO: 866 - RNA, 22 nt, synthetic construct
  misc_feature 1..22: note = Synthetic: CD274-1562
  source 1..22: mol_type = other RNA
ttacaaatactccatgttttgg

SEQ ID NO: 867 - RNA, 22 nt, synthetic construct
  misc_feature 1..22: note = Synthetic: CD274-1606
  source 1..22: mol_type = other RNA
ttgcttccaatgtatacttggg

SEQ ID NO: 868 - RNA, 22 nt, synthetic construct
  misc_feature 1..22: note = Synthetic: CD274-1607
  source 1..22: mol_type = other RNA
tatgcttccaatgtatacttgg

SEQ ID NO: 869 - RNA, 22 nt, synthetic construct
  misc_feature 1..22: note = Synthetic: CD274-1649
  source 1..22: mol_type = other RNA
ttaaataaaggtgacatcctgg

SEQ ID NO: 870 - RNA, 22 nt, synthetic construct
  misc_feature 1..22: note = Synthetic: CD274-1728
  source 1..22: mol_type = other RNA
ttgatatttaaatggaacaggg

SEQ ID NO: 871 - RNA, 22 nt, synthetic construct
  misc_feature 1..22: note = Synthetic: CD274-1794
  source 1..22: mol_type = other RNA
ttcacaacagggtggttacagg

SEQ ID NO: 872 - RNA, 22 nt, synthetic construct
  misc_feature 1..22: note = Synthetic: CD274-1795
  source 1..22: mol_type = other RNA
tatcacaacagggtggttacgg

SEQ ID NO: 873 - RNA, 22 nt, synthetic construct
  misc_feature 1..22: note = Synthetic: CD274-1806
  source 1..22: mol_type = other RNA
ttaatagtggttatcacaacgg

SEQ ID NO: 874 - RNA, 22 nt, synthetic construct
  misc_feature 1..22: note = Synthetic: CD274-1807
  source 1..22: mol_type = other RNA
tataatagtggttatcacaagg

SEQ ID NO: 875 - RNA, 22 nt, synthetic construct
  misc_feature 1..22: note = Synthetic: CD274-1808
  source 1..22: mol_type = other RNA
taataatagtggttatcacagg

SEQ ID NO: 876 - RNA, 22 nt, synthetic construct
  misc_feature 1..22: note = Synthetic: CD274-1809
  source 1..22: mol_type = other RNA
taaataatagtggttatcacgg

SEQ ID NO: 877 - RNA, 22 nt, synthetic construct
  misc_feature 1..22: note = Synthetic: CD274-1810
  source 1..22: mol_type = other RNA
taaaataatagtggttatcagg

SEQ ID NO: 878 - RNA, 22 nt, synthetic construct
  misc_feature 1..22: note = Synthetic: CD274-1811
  source 1..22: mol_type = other RNA
ttaaaataatagtggttatcgg

SEQ ID NO: 879 - RNA, 22 nt, synthetic construct
  misc_feature 1..22: note = Synthetic: CD274-1812
  source 1..22: mol_type = other RNA
tgtaaaataatagtggttatgg

SEQ ID NO: 880 - RNA, 22 nt, synthetic construct
  misc_feature 1..22: note = Synthetic: CD274-1906
  source 1..22: mol_type = other RNA
ttattataaaaggacagtgggg

SEQ ID NO: 881 - RNA, 22 nt, synthetic construct
  misc_feature 1..22: note = Synthetic: CD274-1907
  source 1..22: mol_type = other RNA
tgtattataaaaggacagtggg

SEQ ID NO: 882 - RNA, 22 nt, synthetic construct
  misc_feature 1..22: note = Synthetic: CD274-1908
  source 1..22: mol_type = other RNA
ttgtattataaaaggacagtgg

SEQ ID NO: 883 - RNA, 22 nt, synthetic construct
  misc_feature 1..22: note = Synthetic: CD274-1909
  source 1..22: mol_type = other RNA
tttgtattataaaaggacaggg

SEQ ID NO: 884 - RNA, 22 nt, synthetic construct
  misc_feature 1..22: note = Synthetic: CD274-1910
  source 1..22: mol_type = other RNA
tattgtattataaaaggacagg

SEQ ID NO: 885 - RNA, 22 nt, synthetic construct
  misc_feature 1..22: note = Synthetic: CD274-1913
  source 1..22: mol_type = other RNA
ttaaattgtattataaaagggg

SEQ ID NO: 886 - RNA, 22 nt, synthetic construct
  misc_feature 1..22: note = Synthetic: CD274-1915
  source 1..22: mol_type = other RNA
ttgtaaattgtattataaaagg

SEQ ID NO: 887 - RNA, 22 nt, synthetic construct
  misc_feature 1..22: note = Synthetic: CD274-1919
  source 1..22: mol_type = other RNA
ttagctgtaaattgtattatgg

SEQ ID NO: 888 - RNA, 22 nt, synthetic construct
  misc_feature 1..22: note = Synthetic: CD274-1931
  source 1..22: mol_type = other RNA
ttaaagtaaaatatagctgtgg

SEQ ID NO: 889 - RNA, 22 nt, synthetic construct
  misc_feature 1..22: note = Synthetic: CD274-1935
  source 1..22: mol_type = other RNA
ttgcttaaagtaaaatataggg

SEQ ID NO: 890 - RNA, 22 nt, synthetic construct
  misc_feature 1..22: note = Synthetic: CD274-1937
  source 1..22: mol_type = other RNA
tattgcttaaagtaaaatatgg

SEQ ID NO: 891 - RNA, 22 nt, synthetic construct
  misc_feature 1..22: note = Synthetic: CD274-2014
  source 1..22: mol_type = other RNA
ttcacatctgtagattcaatgg

SEQ ID NO: 892 - RNA, 22 nt, synthetic construct
  misc_feature 1..22: note = Synthetic: CD274-2088
  source 1..22: mol_type = other RNA
tattgtaataatacattttcgg

SEQ ID NO: 893 - RNA, 22 nt, synthetic construct
  misc_feature 1..22: note = Synthetic: CD274-2221
  source 1..22: mol_type = other RNA
ttgaaaattactctgattatgg

SEQ ID NO: 894 - RNA, 22 nt, synthetic construct
  misc_feature 1..22: note = Synthetic: CD274-2225
  source 1..22: mol_type = other RNA
ttaaatgaaaattactctgagg

SEQ ID NO: 895 - RNA, 22 nt, synthetic construct
  misc_feature 1..22: note = Synthetic: CD274-2227
  source 1..22: mol_type = other RNA
ttgtaaatgaaaattactctgg

SEQ ID NO: 896 - RNA, 22 nt, synthetic construct
  misc_feature 1..22: note = Synthetic: CD274-2228
  source 1..22: mol_type = other RNA
tttgtaaatgaaaattactcgg

SEQ ID NO: 897 - RNA, 22 nt, synthetic construct
  misc_feature 1..22: note = Synthetic: CD274-2229
  source 1..22: mol_type = other RNA
ttttgtaaatgaaaattactgg

SEQ ID NO: 898 - RNA, 22 nt, synthetic construct
  misc_feature 1..22: note = Synthetic: CD274-2231
  source 1..22: mol_type = other RNA
ttctttgtaaatgaaaattagg

SEQ ID NO: 899 - RNA, 22 nt, synthetic construct
  misc_feature 1..22: note = Synthetic: CD274-2233
  source 1..22: mol_type = other RNA
ttctctttgtaaatgaaaatgg

SEQ ID NO: 900 - RNA, 22 nt, synthetic construct
  misc_feature 1..22: note = Synthetic: CD274-2263
  source 1..22: mol_type = other RNA
ttatttttcagggttattttgg

SEQ ID NO: 901 - RNA, 22 nt, synthetic construct
  misc_feature 1..22: note = Synthetic: CD274-2266
  source 1..22: mol_type = other RNA
ttgttatttttcagggttatgg

SEQ ID NO: 902 - RNA, 22 nt, synthetic construct
  misc_feature 1..22: note = Synthetic: CD274-2333
  source 1..22: mol_type = other RNA
taacaagcattagattatatgg

SEQ ID NO: 903 - RNA, 22 nt, synthetic construct
  misc_feature 1..22: note = Synthetic: CD274-2335
  source 1..22: mol_type = other RNA
ttaaacaagcattagattatgg

SEQ ID NO: 904 - RNA, 22 nt, synthetic construct
  misc_feature 1..22: note = Synthetic: CD274-2337
  source 1..22: mol_type = other RNA
ttataaacaagcattagattgg

SEQ ID NO: 905 - RNA, 22 nt, synthetic construct
  misc_feature 1..22: note = Synthetic: CD274-2338
  source 1..22: mol_type = other RNA
tatataaacaagcattagatgg

SEQ ID NO: 906 - RNA, 22 nt, synthetic construct
  misc_feature 1..22: note = Synthetic: CD274-2339
  source 1..22: mol_type = other RNA
ttatataaacaagcattagagg

SEQ ID NO: 907 - RNA, 22 nt, synthetic construct
  misc_feature 1..22: note = Synthetic: CD274-2341
  source 1..22: mol_type = other RNA
tactatataaacaagcattagg

SEQ ID NO: 908 - RNA, 22 nt, synthetic construct
  misc_feature 1..22: note = Synthetic: CD274-2343
  source 1..22: mol_type = other RNA
tacactatataaacaagcatgg

SEQ ID NO: 909 - RNA, 22 nt, synthetic construct
  misc_feature 1..22: note = Synthetic: CD274-2362
  source 1..22: mol_type = other RNA
taactgttaaacaataccaggg

SEQ ID NO: 910 - RNA, 22 nt, synthetic construct
  misc_feature 1..22: note = Synthetic: CD274-2363
  source 1..22: mol_type = other RNA
tgaactgttaaacaataccagg

SEQ ID NO: 911 - RNA, 22 nt, synthetic construct
  misc_feature 1..22: note = Synthetic: CD274-2407
  source 1..22: mol_type = other RNA
taaggtatgaatttaaaattgg

SEQ ID NO: 912 - RNA, 22 nt, synthetic construct
  misc_feature 1..22: note = Synthetic: CD274-2556
  source 1..22: mol_type = other RNA
tacatttccaaatgtagactgg

SEQ ID NO: 913 - RNA, 22 nt, synthetic construct
  misc_feature 1..22: note = Synthetic: CD274-2557
  source 1..22: mol_type = other RNA
ttacatttccaaatgtagacgg

SEQ ID NO: 914 - RNA, 22 nt, synthetic construct
  misc_feature 1..22: note = Synthetic: CD274-2561
  source 1..22: mol_type = other RNA
taacatacatttccaaatgtgg

SEQ ID NO: 915 - RNA, 22 nt, synthetic construct
  misc_feature 1..22: note = Synthetic: CD274-2562
  source 1..22: mol_type = other RNA
ttaacatacatttccaaatggg

SEQ ID NO: 916 - RNA, 22 nt, synthetic construct
  misc_feature 1..22: note = Synthetic: CD274-2563
  source 1..22: mol_type = other RNA
tttaacatacatttccaaatgg

SEQ ID NO: 917 - RNA, 22 nt, synthetic construct
  misc_feature 1..22: note = Synthetic: CD274-2565
  source 1..22: mol_type = other RNA
tttttaacatacatttccaagg

SEQ ID NO: 918 - RNA, 22 nt, synthetic construct
  misc_feature 1..22: note = Synthetic: CD274-2568
  source 1..22: mol_type = other RNA
ttgcttttaacatacatttcgg

SEQ ID NO: 919 - RNA, 22 nt, synthetic construct
  misc_feature 1..22: note = Synthetic: CD274-2634
  source 1..22: mol_type = other RNA
taaaatagcaaagtacacaggg

SEQ ID NO: 920 - RNA, 22 nt, synthetic construct
  misc_feature 1..22: note = Synthetic: CD274-2636
  source 1..22: mol_type = other RNA
ttaaaaatagcaaagtacacgg

SEQ ID NO: 921 - RNA, 22 nt, synthetic construct
  misc_feature 1..22: note = Synthetic: CD274-2637
  source 1..22: mol_type = other RNA
tataaaaatagcaaagtacagg

SEQ ID NO: 922 - RNA, 22 nt, synthetic construct
  misc_feature 1..22: note = Synthetic: CD274-2640
  source 1..22: mol_type = other RNA
ttaaataaaaatagcaaagtgg

SEQ ID NO: 923 - RNA, 22 nt, synthetic construct
  misc_feature 1..22: note = Synthetic: CD274-2673
  source 1..22: mol_type = other RNA
tttcattccatctgctatatgg

SEQ ID NO: 924 - RNA, 22 nt, synthetic construct
  misc_feature 1..22: note = Synthetic: CD274-2678
  source 1..22: mol_type = other RNA
ttcaaattcattccatctgcgg

SEQ ID NO: 925 - RNA, 22 nt, synthetic construct
  misc_feature 1..22: note = Synthetic: CD274-2679
  source 1..22: mol_type = other RNA
tttcaaattcattccatctggg

SEQ ID NO: 926 - RNA, 22 nt, synthetic construct
  misc_feature 1..22: note = Synthetic: CD274-2801
  source 1..22: mol_type = other RNA
ttggttgtctaaatgtatatgg

SEQ ID NO: 927 - RNA, 22 nt, synthetic construct
  misc_feature 1..22: note = Synthetic: CD274-2815
  source 1..22: mol_type = other RNA
ttacttaacaaatggtggttgg

SEQ ID NO: 928 - RNA, 22 nt, synthetic construct
  misc_feature 1..22: note = Synthetic: CD274-2819
  source 1..22: mol_type = other RNA
tcaaatacttaacaaatggtgg

SEQ ID NO: 929 - RNA, 22 nt, synthetic construct
  misc_feature 1..22: note = Synthetic: CD274-2924
  source 1..22: mol_type = other RNA
ttaataataagattgcttttgg

SEQ ID NO: 930 - RNA, 22 nt, synthetic construct
  misc_feature 1..22: note = Synthetic: CD274-2935
  source 1..22: mol_type = other RNA
ttcatacagagttaataatagg

SEQ ID NO: 931 - RNA, 22 nt, synthetic construct
  misc_feature 1..22: note = Synthetic: CD274-2936
  source 1..22: mol_type = other RNA
tgtcatacagagttaataatgg

SEQ ID NO: 932 - RNA, 22 nt, synthetic construct
  misc_feature 1..22: note = Synthetic: CD274-2937
  source 1..22: mol_type = other RNA
ttgtcatacagagttaataagg

SEQ ID NO: 933 - RNA, 22 nt, synthetic construct
  misc_feature 1..22: note = Synthetic: CD274-2939
  source 1..22: mol_type = other RNA
ttctgtcatacagagttaatgg

SEQ ID NO: 934 - RNA, 22 nt, synthetic construct
  misc_feature 1..22: note = Synthetic: CD274-2994
  source 1..22: mol_type = other RNA
ttcaaagtgaagtttatactgg

SEQ ID NO: 935 - RNA, 22 nt, synthetic construct
  misc_feature 1..22: note = Synthetic: CD274-3015
  source 1..22: mol_type = other RNA
ttgtgattttgcaagtacaggg

SEQ ID NO: 936 - RNA, 22 nt, synthetic construct
  misc_feature 1..22: note = Synthetic: CD274-3019
  source 1..22: mol_type = other RNA
taaaatgtgattttgcaagtgg

SEQ ID NO: 937 - RNA, 22 nt, synthetic construct
  misc_feature 1..22: note = Synthetic: CD274-3094
  source 1..22: mol_type = other RNA
ttcaagcacaacgaatgagggg

SEQ ID NO: 938 - RNA, 22 nt, synthetic construct
  misc_feature 1..22: note = Synthetic: CD274-3095
  source 1..22: mol_type = other RNA
tttcaagcacaacgaatgaggg

SEQ ID NO: 939 - RNA, 22 nt, synthetic construct
  misc_feature 1..22: note = Synthetic: CD274-3305
  source 1..22: mol_type = other RNA
ttacaaacagataacacaaggg

SEQ ID NO: 940 - RNA, 22 nt, synthetic construct
  misc_feature 1..22: note = Synthetic: CD274-3306
  source 1..22: mol_type = other RNA
tgtacaaacagataacacaagg

SEQ ID NO: 941 - RNA, 22 nt, synthetic construct
  misc_feature 1..22: note = Synthetic: CD274-3307
  source 1..22: mol_type = other RNA
ttgtacaaacagataacacagg

SEQ ID NO: 942 - RNA, 22 nt, synthetic construct
  misc_feature 1..22: note = Synthetic: CD274-3308
  source 1..22: mol_type = other RNA
tatgtacaaacagataacacgg

SEQ ID NO: 943 - RNA, 22 nt, synthetic construct
  misc_feature 1..22: note = Synthetic: CD274-3310
  source 1..22: mol_type = other RNA
tacatgtacaaacagataacgg

SEQ ID NO: 944 - RNA, 22 nt, synthetic construct
  misc_feature 1..22: note = Synthetic: CD274-3319
  source 1..22: mol_type = other RNA
ttacaaatgcacatgtacaagg

SEQ ID NO: 945 - RNA, 22 nt, synthetic construct
  misc_feature 1..22: note = Synthetic: CD274-3325
  source 1..22: mol_type = other RNA
tttactgtacaaatgcacatgg

SEQ ID NO: 946 - RNA, 22 nt, synthetic construct
  misc_feature 1..22: note = Synthetic: CD274-3355
  source 1..22: mol_type = other RNA
ttaattcacacaaagaacacgg

SEQ ID NO: 947 - RNA, 22 nt, synthetic construct
  misc_feature 1..22: note = Synthetic: CD274-3357
  source 1..22: mol_type = other RNA
ttgtaattcacacaaagaacgg

SEQ ID NO: 948 - RNA, 22 nt, synthetic construct
  misc_feature 1..22: note = Synthetic: CD274-3441
  source 1..22: mol_type = other RNA
ttacaaatccaacaccacaagg

SEQ ID NO: 949 - RNA, 22 nt, synthetic construct
  misc_feature 1..22: note = Synthetic: CD274-3522
  source 1..22: mol_type = other RNA
ttgacaatcaaatgcagaatgg

SEQ ID NO: 950 - RNA, 22 nt, synthetic construct
  misc_feature 1..22: note = Synthetic: CD274-3528
  source 1..22: mol_type = other RNA
taaaaagtgacaatcaaatggg

SEQ ID NO: 951 - RNA, 22 nt, synthetic construct
  misc_feature 1..22: note = Synthetic: CD274-3531
  source 1..22: mol_type = other RNA
ttacaaaaagtgacaatcaagg

SEQ ID NO: 952 - RNA, 22 nt, synthetic construct
  misc_feature 1..22: note = Synthetic: CD274-3532
  source 1..22: mol_type = other RNA
tgtacaaaaagtgacaatcagg

SEQ ID NO: 953 - RNA, 22 nt, synthetic construct
  misc_feature 1..22: note = Synthetic: CD274-3534
  source 1..22: mol_type = other RNA
taggtacaaaaagtgacaatgg

SEQ ID NO: 954 - RNA, 22 nt, synthetic construct
  misc_feature 1..22: note = Synthetic: CD274-3541
  source 1..22: mol_type = other RNA
tttaatgcaggtacaaaaaggg

SEQ ID NO: 955 - RNA, 22 nt, synthetic construct
  misc_feature 1..22: note = Synthetic: CD274-3542
  source 1..22: mol_type = other RNA
tattaatgcaggtacaaaaagg

SEQ ID NO: 956 - RNA, 22 nt, synthetic construct
  misc_feature 1..22: note = Synthetic: CD274-3545
  source 1..22: mol_type = other RNA
ttaaattaatgcaggtacaagg

SEQ ID NO: 957 - RNA, 22 nt, synthetic construct
  misc_feature 1..22: note = Synthetic: CD274-3546
  source 1..22: mol_type = other RNA
tttaaattaatgcaggtacagg

SEQ ID NO: 958 - RNA, 22 nt, synthetic construct
  misc_feature 1..22: note = Synthetic: CD274-3569
  source 1..22: mol_type = other RNA
tacaaaataaataagaatatgg

SEQ ID NO: 959 - RNA, 22 nt, synthetic construct
  misc_feature 1..22: note = Synthetic: CD274-3577
  source 1..22: mol_type = other RNA
taccaagtaacaaaataaatgg

SEQ ID NO: 960 - RNA, 22 nt, synthetic construct
  misc_feature 1..22: note = Synthetic: CD274-3578
  source 1..22: mol_type = other RNA
ttaccaagtaacaaaataaagg

SEQ ID NO: 961 - RNA, 22 nt, synthetic construct
  misc_feature 1..22: note = Synthetic: CD274-3580
  source 1..22: mol_type = other RNA
ttgtaccaagtaacaaaatagg

SEQ ID NO: 962 - RNA, 22 nt, synthetic construct
  misc_feature 1..22: note = Synthetic: CD274-3604
  source 1..22: mol_type = other RNA
ttaaacaagaaaatggacatgg

SEQ ID NO: 963 - RNA, 22 nt, synthetic construct
  misc_feature 1..22: note = Synthetic: CD274-3610
  source 1..22: mol_type = other RNA
tacaaaataaacaagaaaatgg

SEQ ID NO: 964 - RNA, 22 nt, synthetic construct
  misc_feature 1..22: note = Synthetic: CD274-3622
  source 1..22: mol_type = other RNA
tattttattaaacacaaaatgg

SEQ ID NO: 965 - RNA, 36 nt, synthetic construct; identical to SEQ ID NO: 483
  misc_feature 1..36: note = Synthetic: CD274-0088
  modified_base 1: mod_base = OTHER; note = 2'-O-methyl nucleotide linked via phosphorothioate
  modified_base 2..7: mod_base = OTHER; note = 2'-O-methyl nucleotide
  modified_base 8..11: mod_base = OTHER; note = 2'-Fluoro nucleotide
  modified_base 12..27: mod_base = OTHER; note = 2'-O-methyl nucleotide
  modified_base 28..30: mod_base = OTHER; note = aminodiethoxymethanol-adenosine-N-acetylgalactosamine
  modified_base 31..36: mod_base = OTHER; note = 2'-O-methyl nucleotide
  source 1..36: mol_type = other RNA

SEQ ID NO: 966 - RNA, 36 nt, synthetic construct; identical to SEQ ID NO: 484
  misc_feature 1..36: note = Synthetic: CD274-0094
  modified_base 1: mod_base = OTHER; note = 2'-O-methyl nucleotide linked via phosphorothioate
  modified_base 2..7: mod_base = OTHER; note = 2'-O-methyl nucleotide
  modified_base 8..11: mod_base = OTHER; note = 2'-Fluoro nucleotide
  modified_base 12..27: mod_base = OTHER; note = 2'-O-methyl nucleotide
  modified_base 28..30: mod_base = OTHER; note = aminodiethoxymethanol-adenosine-N-acetylgalactosamine
  modified_base 31..36: mod_base = OTHER; note = 2'-O-methyl nucleotide
  source 1..36: mol_type = other RNA

SEQ ID NO: 967 - skipped

SEQ ID NO: 968 - RNA, 36 nt, synthetic construct; identical to SEQ ID NO: 486
  misc_feature 1..36: note = Synthetic: CD274-0097
  modified_base 1: mod_base = OTHER; note = 2'-O-methyl nucleotide linked via phosphorothioate
  modified_base 2..7: mod_base = OTHER; note = 2'-O-methyl nucleotide
  modified_base 8..11: mod_base = OTHER; note = 2'-Fluoro nucleotide
  modified_base 12..27: mod_base = OTHER; note = 2'-O-methyl nucleotide
  modified_base 28..30: mod_base = OTHER; note = aminodiethoxymethanol-adenosine-N-acetylgalactosamine
  modified_base 31..36: mod_base = OTHER; note = 2'-O-methyl nucleotide
  source 1..36: mol_type = other RNA

SEQ ID NO: 969 - RNA, 36 nt, synthetic construct; identical to SEQ ID NO: 487
  misc_feature 1..36: note = Synthetic: CD274-0098
  modified_base 1: mod_base = OTHER; note = 2'-O-methyl nucleotide linked via phosphorothioate
  modified_base 2..7: mod_base = OTHER; note = 2'-O-methyl nucleotide
  modified_base 8..11: mod_base = OTHER; note = 2'-Fluoro nucleotide
  modified_base 12..27: mod_base = OTHER; note = 2'-O-methyl nucleotide
  modified_base 28..30: mod_base = OTHER; note = aminodiethoxymethanol-adenosine-N-acetylgalactosamine
  modified_base 31..36: mod_base = OTHER; note = 2'-O-methyl nucleotide
  source 1..36: mol_type = other RNA

SEQ ID NO: 970 - RNA, 36 nt, synthetic construct; identical to SEQ ID NO: 488
  misc_feature 1..36: note = Synthetic: CD274-0100
  modified_base 1: mod_base = OTHER; note = 2'-O-methyl nucleotide linked via phosphorothioate
  modified_base 2..7: mod_base = OTHER; note = 2'-O-methyl nucleotide
  modified_base 8..11: mod_base = OTHER; note = 2'-Fluoro nucleotide
  modified_base 12..27: mod_base = OTHER; note = 2'-O-methyl nucleotide
  modified_base 28..30: mod_base = OTHER; note = aminodiethoxymethanol-adenosine-N-acetylgalactosamine
  modified_base 31..36: mod_base = OTHER; note = 2'-O-methyl nucleotide
  source 1..36: mol_type = other RNA

SEQ ID NO: 971 - RNA, 36 nt, synthetic construct; identical to SEQ ID NO: 489
  misc_feature 1..36: note = Synthetic: CD274-0102
  modified_base 1: mod_base = OTHER; note = 2'-O-methyl nucleotide linked via phosphorothioate
  modified_base 2..7: mod_base = OTHER; note = 2'-O-methyl nucleotide
  modified_base 8..11: mod_base = OTHER; note = 2'-Fluoro nucleotide
  modified_base 12..27: mod_base = OTHER; note = 2'-O-methyl nucleotide
  modified_base 28..30: mod_base = OTHER; note = aminodiethoxymethanol-adenosine-N-acetylgalactosamine
  modified_base 31..36: mod_base = OTHER; note = 2'-O-methyl nucleotide
  source 1..36: mol_type = other RNA

SEQ ID NO: 972 - RNA, 36 nt, synthetic construct; identical to SEQ ID NO: 490
  misc_feature 1..36: note = Synthetic: CD274-0167
  modified_base 1: mod_base = OTHER; note = 2'-O-methyl nucleotide linked via phosphorothioate
  modified_base 2..7: mod_base = OTHER; note = 2'-O-methyl nucleotide
  modified_base 8..11: mod_base = OTHER; note = 2'-Fluoro nucleotide
  modified_base 12..27: mod_base = OTHER; note = 2'-O-methyl nucleotide
  modified_base 28..30: mod_base = OTHER; note = aminodiethoxymethanol-adenosine-N-acetylgalactosamine
  modified_base 31..36: mod_base = OTHER; note = 2'-O-methyl nucleotide
  source 1..36: mol_type = other RNA

SEQ ID NO: 973 - RNA, 36 nt, synthetic construct; identical to SEQ ID NO: 492
  misc_feature 1..36: note = Synthetic: CD274-0193
  modified_base 1: mod_base = OTHER; note = 2'-O-methyl nucleotide linked via phosphorothioate
  modified_base 2..7: mod_base = OTHER; note = 2'-O-methyl nucleotide
  modified_base 8..11: mod_base = OTHER; note = 2'-Fluoro nucleotide
  modified_base 12..27: mod_base = OTHER; note = 2'-O-methyl nucleotide
  modified_base 28..30: mod_base = OTHER; note = aminodiethoxymethanol-adenosine-N-acetylgalactosamine
  modified_base 31..36: mod_base = OTHER; note = 2'-O-methyl nucleotide
  source 1..36: mol_type = other RNA

SEQ ID NO: 974 - RNA, 36 nt, synthetic construct; identical to SEQ ID NO: 493
  misc_feature 1..36: note = Synthetic: CD274-0194
  modified_base 1: mod_base = OTHER; note = 2'-O-methyl nucleotide linked via phosphorothioate
  modified_base 2..7: mod_base = OTHER; note = 2'-O-methyl nucleotide
  modified_base 8..11: mod_base = OTHER; note = 2'-Fluoro nucleotide
  modified_base 12..27: mod_base = OTHER; note = 2'-O-methyl nucleotide
  modified_base 28..30: mod_base = OTHER; note = aminodiethoxymethanol-adenosine-N-acetylgalactosamine
  modified_base 31..36: mod_base = OTHER; note = 2'-O-methyl nucleotide
  source 1..36: mol_type = other RNA

SEQ ID NO: 975 - RNA, 36 nt, synthetic construct; identical to SEQ ID NO: 494
  misc_feature 1..36: note = Synthetic: CD274-0197
  modified_base 1: mod_base = OTHER; note = 2'-O-methyl nucleotide linked via phosphorothioate
  modified_base 2..7: mod_base = OTHER; note = 2'-O-methyl nucleotide
  modified_base 8..11: mod_base = OTHER; note = 2'-Fluoro nucleotide
  modified_base 12..27: mod_base = OTHER; note = 2'-O-methyl nucleotide
  modified_base 28..30: mod_base = OTHER; note = aminodiethoxymethanol-adenosine-N-acetylgalactosamine
  modified_base 31..36: mod_base = OTHER; note = 2'-O-methyl nucleotide
  source 1..36: mol_type = other RNA

SEQ ID NO: 976 - RNA, 36 nt, synthetic construct; identical to SEQ ID NO: 495
  misc_feature 1..36: note = Synthetic: CD274-0200
  modified_base 1: mod_base = OTHER; note = 2'-O-methyl nucleotide linked via phosphorothioate
  modified_base 2..7: mod_base = OTHER; note = 2'-O-methyl nucleotide
  modified_base 8..11: mod_base = OTHER; note = 2'-Fluoro nucleotide
  modified_base 12..27: mod_base = OTHER; note = 2'-O-methyl nucleotide
  modified_base 28..30: mod_base = OTHER; note = aminodiethoxymethanol-adenosine-N-acetylgalactosamine
  modified_base 31..36: mod_base = OTHER; note = 2'-O-methyl nucleotide
  source 1..36: mol_type = other RNA

SEQ ID NO: 977 - RNA, 36 nt, synthetic construct; identical to SEQ ID NO: 496
  misc_feature 1..36: note = Synthetic: CD274-0204
  modified_base 1: mod_base = OTHER; note = 2'-O-methyl nucleotide linked via phosphorothioate
  modified_base 2..7: mod_base = OTHER; note = 2'-O-methyl nucleotide
  modified_base 8..11: mod_base = OTHER; note = 2'-Fluoro nucleotide
  modified_base 12..27: mod_base = OTHER; note = 2'-O-methyl nucleotide
  modified_base 28..30: mod_base = OTHER; note = aminodiethoxymethanol-adenosine-N-acetylgalactosamine
  modified_base 31..36: mod_base = OTHER; note = 2'-O-methyl nucleotide
  source 1..36: mol_type = other RNA

SEQ ID NO: 978 - RNA, 36 nt, synthetic construct; identical to SEQ ID NO: 497
  misc_feature 1..36: note = Synthetic: CD274-0219
  modified_base 1: mod_base = OTHER; note = 2'-O-methyl nucleotide linked via phosphorothioate
  modified_base 2..7: mod_base = OTHER; note = 2'-O-methyl nucleotide
  modified_base 8..11: mod_base = OTHER; note = 2'-Fluoro nucleotide
  modified_base 12..27: mod_base = OTHER; note = 2'-O-methyl nucleotide
  modified_base 28..30: mod_base = OTHER; note = aminodiethoxymethanol-adenosine-N-acetylgalactosamine
  modified_base 31..36: mod_base = OTHER; note = 2'-O-methyl nucleotide
  source 1..36: mol_type = other RNA

SEQ ID NO: 979 - RNA, 36 nt, synthetic construct; identical to SEQ ID NO: 498
  misc_feature 1..36: note = Synthetic: CD274-0222
  modified_base 1: mod_base = OTHER; note = 2'-O-methyl nucleotide linked via phosphorothioate
  modified_base 2..7: mod_base = OTHER; note = 2'-O-methyl nucleotide
  modified_base 8..11: mod_base = OTHER; note = 2'-Fluoro nucleotide
  modified_base 12..27: mod_base = OTHER; note = 2'-O-methyl nucleotide
  modified_base 28..30: mod_base = OTHER; note = aminodiethoxymethanol-adenosine-N-acetylgalactosamine
  modified_base 31..36: mod_base = OTHER; note = 2'-O-methyl nucleotide
  source 1..36: mol_type = other RNA

SEQ ID NO: 980 - RNA, 36 nt, synthetic construct; identical to SEQ ID NO: 499
  misc_feature 1..36: note = Synthetic: CD274-0225
  modified_base 1: mod_base = OTHER; note = 2'-O-methyl nucleotide linked via phosphorothioate
  modified_base 2..7: mod_base = OTHER; note = 2'-O-methyl nucleotide
  modified_base 8..11: mod_base = OTHER; note = 2'-Fluoro nucleotide
  modified_base 12..27: mod_base = OTHER; note = 2'-O-methyl nucleotide
  modified_base 28..30: mod_base = OTHER; note = aminodiethoxymethanol-adenosine-N-acetylgalactosamine
  modified_base 31..36: mod_base = OTHER; note = 2'-O-methyl nucleotide
  source 1..36: mol_type = other RNA

SEQ ID NO: 981 - RNA, 36 nt, synthetic construct; identical to SEQ ID NO: 500
  misc_feature 1..36: note = Synthetic: CD274-0268
  modified_base 1: mod_base = OTHER; note = 2'-O-methyl nucleotide linked via phosphorothioate
  modified_base 2..7: mod_base = OTHER; note = 2'-O-methyl nucleotide
  modified_base 8..11: mod_base = OTHER; note = 2'-Fluoro nucleotide
  modified_base 12..27: mod_base = OTHER; note = 2'-O-methyl nucleotide
  modified_base 28..30: mod_base = OTHER; note = aminodiethoxymethanol-adenosine-N-acetylgalactosamine
  modified_base 31..36: mod_base = OTHER; note = 2'-O-methyl nucleotide
  source 1..36: mol_type = other RNA

SEQ ID NO: 982 - RNA, 36 nt, synthetic construct; identical to SEQ ID NO: 501
  misc_feature 1..36: note = Synthetic: CD274-0269
  modified_base 1: mod_base = OTHER; note = 2'-O-methyl nucleotide linked via phosphorothioate
  modified_base 2..7: mod_base = OTHER; note = 2'-O-methyl nucleotide
  modified_base 8..11: mod_base = OTHER; note = 2'-Fluoro nucleotide
  modified_base 12..27: mod_base = OTHER; note = 2'-O-methyl nucleotide
  modified_base 28..30: mod_base = OTHER; note = aminodiethoxymethanol-adenosine-N-acetylgalactosamine
  modified_base 31..36: mod_base = OTHER; note = 2'-O-methyl nucleotide
  source 1..36: mol_type = other RNA

SEQ ID NO: 983 - RNA, 36 nt, synthetic construct; identical to SEQ ID NO: 491
  misc_feature 1..36: note = Synthetic: CD274-0271
  modified_base 1: mod_base = OTHER; note = 2'-O-methyl nucleotide linked via phosphorothioate
  modified_base 2..7: mod_base = OTHER; note = 2'-O-methyl nucleotide
  modified_base 8..11: mod_base = OTHER; note = 2'-Fluoro nucleotide
  modified_base 12..27: mod_base = OTHER; note = 2'-O-methyl nucleotide
  modified_base 28..30: mod_base = OTHER; note = aminodiethoxymethanol-adenosine-N-acetylgalactosamine
  modified_base 31..36: mod_base = OTHER; note = 2'-O-methyl nucleotide
  source 1..36: mol_type = other RNA

SEQ ID NO: 984 - RNA, 36 nt, synthetic construct; identical to SEQ ID NO: 502
  misc_feature 1..36: note = Synthetic: CD274-0274
  modified_base 1: mod_base = OTHER; note = 2'-O-methyl nucleotide linked via phosphorothioate
  modified_base 2..7: mod_base = OTHER; note = 2'-O-methyl nucleotide
  modified_base 8..11: mod_base = OTHER; note = 2'-Fluoro nucleotide
  modified_base 12..27: mod_base = OTHER; note = 2'-O-methyl nucleotide
  modified_base 28..30: mod_base = OTHER; note = aminodiethoxymethanol-adenosine-N-acetylgalactosamine
  modified_base 31..36: mod_base = OTHER; note = 2'-O-methyl nucleotide
  source 1..36: mol_type = other RNA

SEQ ID NO: 985 - RNA, 36 nt, synthetic construct; identical to SEQ ID NO: 503
  misc_feature 1..36: note = Synthetic: CD274-0275
  modified_base 1: mod_base = OTHER; note = 2'-O-methyl nucleotide linked via phosphorothioate
  modified_base 2..7: mod_base = OTHER; note = 2'-O-methyl nucleotide
  modified_base 8..11: mod_base = OTHER; note = 2'-Fluoro nucleotide
  modified_base 12..27: mod_base = OTHER; note = 2'-O-methyl nucleotide
  modified_base 28..30: mod_base = OTHER; note = aminodiethoxymethanol-adenosine-N-acetylgalactosamine
  modified_base 31..36: mod_base = OTHER; note = 2'-O-methyl nucleotide
  source 1..36: mol_type = other RNA

SEQ ID NO: 986 - RNA, 36 nt, synthetic construct; identical to SEQ ID NO: 504
  misc_feature 1..36: note = Synthetic: CD274-0277
  modified_base 1: mod_base = OTHER; note = 2'-O-methyl nucleotide linked via phosphorothioate
  modified_base 2..7: mod_base = OTHER; note = 2'-O-methyl nucleotide
  modified_base 8..11: mod_base = OTHER; note = 2'-Fluoro nucleotide
  modified_base 12..27: mod_base = OTHER; note = 2'-O-methyl nucleotide
  modified_base 28..30: mod_base = OTHER; note = aminodiethoxymethanol-adenosine-N-acetylgalactosamine
  modified_base 31..36: mod_base = OTHER; note = 2'-O-methyl nucleotide
  source 1..36: mol_type = other RNA

SEQ ID NO: 987 - RNA, 36 nt, synthetic construct; identical to SEQ ID NO: 505
  misc_feature 1..36: note = Synthetic: CD274-0282
  modified_base 1: mod_base = OTHER; note = 2'-O-methyl nucleotide linked via phosphorothioate
  modified_base 2..7: mod_base = OTHER; note = 2'-O-methyl nucleotide
  modified_base 8..11: mod_base = OTHER; note = 2'-Fluoro nucleotide
  modified_base 12..27: mod_base = OTHER; note = 2'-O-methyl nucleotide
  modified_base 28..30: mod_base = OTHER; note = aminodiethoxymethanol-adenosine-N-acetylgalactosamine
  modified_base 31..36: mod_base = OTHER; note = 2'-O-methyl nucleotide
  source 1..36: mol_type = other RNA

SEQ ID NO: 988 - RNA, 36 nt, synthetic construct; identical to SEQ ID NO: 506
  misc_feature 1..36: note = Synthetic: CD274-0283
  modified_base 1: mod_base = OTHER; note = 2'-O-methyl nucleotide linked via phosphorothioate
  modified_base 2..7: mod_base = OTHER; note = 2'-O-methyl nucleotide
  modified_base 8..11: mod_base = OTHER; note = 2'-Fluoro nucleotide
  modified_base 12..27: mod_base = OTHER; note = 2'-O-methyl nucleotide
  modified_base 28..30: mod_base = OTHER; note = aminodiethoxymethanol-adenosine-N-acetylgalactosamine
  modified_base 31..36: mod_base = OTHER; note = 2'-O-methyl nucleotide
  source 1..36: mol_type = other RNA

SEQ ID NO: 989 - RNA, 36 nt, synthetic construct; identical to SEQ ID NO: 507
  misc_feature 1..36: note = Synthetic: CD274-0394
  modified_base 1: mod_base = OTHER; note = 2'-O-methyl nucleotide linked via phosphorothioate
  modified_base 2..7: mod_base = OTHER; note = 2'-O-methyl nucleotide
  modified_base 8..11: mod_base = OTHER; note = 2'-Fluoro nucleotide
  modified_base 12..27: mod_base = OTHER; note = 2'-O-methyl nucleotide
  modified_base 28..30: mod_base = OTHER; note = aminodiethoxymethanol-adenosine-N-acetylgalactosamine
  modified_base 31..36: mod_base = OTHER; note = 2'-O-methyl nucleotide
  source 1..36: mol_type = other RNA

SEQ ID NO: 990 - RNA, 36 nt, synthetic construct; identical to SEQ ID NO: 508
  misc_feature 1..36: note = Synthetic: CD274-0399
  modified_base 1: mod_base = OTHER; note = 2'-O-methyl nucleotide linked via phosphorothioate
  modified_base 2..7: mod_base = OTHER; note = 2'-O-methyl nucleotide
  modified_base 8..11: mod_base = OTHER; note = 2'-Fluoro nucleotide
  modified_base 12..27: mod_base = OTHER; note = 2'-O-methyl nucleotide
  modified_base 28..30: mod_base = OTHER; note = aminodiethoxymethanol-adenosine-N-acetylgalactosamine
  modified_base 31..36: mod_base = OTHER; note = 2'-O-methyl nucleotide
  source 1..36: mol_type = other RNA

SEQ ID NO: 991 - RNA, 36 nt, synthetic construct; identical to SEQ ID NO: 509
  misc_feature 1..36: note = Synthetic: CD274-0530
  modified_base 1: mod_base = OTHER; note = 2'-O-methyl nucleotide linked via phosphorothioate
  modified_base 2..7: mod_base = OTHER; note = 2'-O-methyl nucleotide
  modified_base 8..11: mod_base = OTHER; note = 2'-Fluoro nucleotide
  modified_base 12..27: mod_base = OTHER; note = 2'-O-methyl nucleotide
  modified_base 28..30: mod_base = OTHER; note = aminodiethoxymethanol-adenosine-N-acetylgalactosamine
  modified_base 31..36: mod_base = OTHER; note = 2'-O-methyl nucleotide
  source 1..36: mol_type = other RNA

SEQ ID NO: 992 - RNA, 36 nt, synthetic construct; identical to SEQ ID NO: 510
  misc_feature 1..36: note = Synthetic: CD274-0531
  modified_base 1: mod_base = OTHER; note = 2'-O-methyl nucleotide linked via phosphorothioate
  modified_base 2..7: mod_base = OTHER; note = 2'-O-methyl nucleotide
  modified_base 8..11: mod_base = OTHER; note = 2'-Fluoro nucleotide
  modified_base 12..27: mod_base = OTHER; note = 2'-O-methyl nucleotide
  modified_base 28..30: mod_base = OTHER; note = aminodiethoxymethanol-adenosine-N-acetylgalactosamine
  modified_base 31..36: mod_base = OTHER; note = 2'-O-methyl nucleotide
  source 1..36: mol_type = other RNA

SEQ ID NO: 993 - RNA, 36 nt, synthetic construct; identical to SEQ ID NO: 511
  misc_feature 1..36: note = Synthetic: CD274-0653
  modified_base 1: mod_base = OTHER; note = 2'-O-methyl nucleotide linked via phosphorothioate
  modified_base 2..7: mod_base = OTHER; note = 2'-O-methyl nucleotide
  modified_base 8..11: mod_base = OTHER; note = 2'-Fluoro nucleotide
  modified_base 12..27: mod_base = OTHER; note = 2'-O-methyl nucleotide
  modified_base 28..30: mod_base = OTHER; note = aminodiethoxymethanol-adenosine-N-acetylgalactosamine
  modified_base 31..36: mod_base = OTHER; note = 2'-O-methyl nucleotide
  source 1..36: mol_type = other RNA

SEQ ID NO: 994 - RNA, 36 nt, synthetic construct; identical to SEQ ID NO: 512
  misc_feature 1..36: note = Synthetic: CD274-0673
  modified_base 1: mod_base = OTHER; note = 2'-O-methyl nucleotide linked via phosphorothioate
  modified_base 2..7: mod_base = OTHER; note = 2'-O-methyl nucleotide
  modified_base 8..11: mod_base = OTHER; note = 2'-Fluoro nucleotide
  modified_base 12..27: mod_base = OTHER; note = 2'-O-methyl nucleotide
  modified_base 28..30: mod_base = OTHER; note = aminodiethoxymethanol-adenosine-N-acetylgalactosamine
  modified_base 31..36: mod_base = OTHER; note = 2'-O-methyl nucleotide
  source 1..36: mol_type = other RNA

SEQ ID NO: 995 - RNA, 36 nt, synthetic construct; identical to SEQ ID NO: 513
  misc_feature 1..36: note = Synthetic: CD274-0693
  modified_base 1: mod_base = OTHER; note = 2'-O-methyl nucleotide linked via phosphorothioate
  modified_base 2..7: mod_base = OTHER; note = 2'-O-methyl nucleotide
  modified_base 8..11: mod_base = OTHER; note = 2'-Fluoro nucleotide
  modified_base 12..27: mod_base = OTHER; note = 2'-O-methyl nucleotide
  modified_base 28..30: mod_base = OTHER; note = aminodiethoxymethanol-adenosine-N-acetylgalactosamine
  modified_base 31..36: mod_base = OTHER; note = 2'-O-methyl nucleotide
  source 1..36: mol_type = other RNA

SEQ ID NO: 996 - RNA, 36 nt, synthetic construct; identical to SEQ ID NO: 514
  misc_feature 1..36: note = Synthetic: CD274-0697
  modified_base 1: mod_base = OTHER; note = 2'-O-methyl nucleotide linked via phosphorothioate
  modified_base 2..7: mod_base = OTHER; note = 2'-O-methyl nucleotide
  modified_base 8..11: mod_base = OTHER; note = 2'-Fluoro nucleotide
  modified_base 12..27: mod_base = OTHER; note = 2'-O-methyl nucleotide
  modified_base 28..30: mod_base = OTHER; note = aminodiethoxymethanol-adenosine-N-acetylgalactosamine
  modified_base 31..36: mod_base = OTHER; note = 2'-O-methyl nucleotide
  source 1..36: mol_type = other RNA

SEQ ID NO: 997 - RNA, 36 nt, synthetic construct; identical to SEQ ID NO: 515
  misc_feature 1..36: note = Synthetic: CD274-0700
  modified_base 1: mod_base = OTHER; note = 2'-O-methyl nucleotide linked via phosphorothioate
  modified_base 2..7: mod_base = OTHER; note = 2'-O-methyl nucleotide
  modified_base 8..11: mod_base = OTHER; note = 2'-Fluoro nucleotide
  modified_base 12..27: mod_base = OTHER; note = 2'-O-methyl nucleotide
  modified_base 28..30: mod_base = OTHER; note = aminodiethoxymethanol-adenosine-N-acetylgalactosamine
  modified_base 31..36: mod_base = OTHER; note = 2'-O-methyl nucleotide
  source 1..36: mol_type = other RNA

SEQ ID NO: 998 - RNA, 36 nt, synthetic construct; identical to SEQ ID NO: 516
  misc_feature 1..36: note = Synthetic: CD274-0701
  modified_base 1: mod_base = OTHER; note = 2'-O-methyl nucleotide linked via phosphorothioate
  modified_base 2..7: mod_base = OTHER; note = 2'-O-methyl nucleotide
  modified_base 8..11: mod_base = OTHER; note = 2'-Fluoro nucleotide
  modified_base 12..27: mod_base = OTHER; note = 2'-O-methyl nucleotide
  modified_base 28..30: mod_base = OTHER; note = aminodiethoxymethanol-adenosine-N-acetylgalactosamine
  modified_base 31..36: mod_base = OTHER; note = 2'-O-methyl nucleotide
  source 1..36: mol_type = other RNA

SEQ ID NO: 999 - RNA, 36 nt, synthetic construct; identical to SEQ ID NO: 517
  misc_feature 1..36: note = Synthetic: CD274-0743
  modified_base 1: mod_base = OTHER; note = 2'-O-methyl nucleotide linked via phosphorothioate
  modified_base 2..7: mod_base = OTHER; note = 2'-O-methyl nucleotide
  modified_base 8..11: mod_base = OTHER; note = 2'-Fluoro nucleotide
  modified_base 12..27: mod_base = OTHER; note = 2'-O-methyl nucleotide
  modified_base 28..30: mod_base = OTHER; note = aminodiethoxymethanol-adenosine-N-acetylgalactosamine
  modified_base 31..36: mod_base = OTHER; note = 2'-O-methyl nucleotide
  source 1..36: mol_type = other RNA

SEQ ID NO: 1000 - RNA, 36 nt, synthetic construct; identical to SEQ ID NO: 518
  misc_feature 1..36: note = Synthetic: CD274-0746
  modified_base 1: mod_base = OTHER; note = 2'-O-methyl nucleotide linked via phosphorothioate
  modified_base 2..7: mod_base = OTHER; note = 2'-O-methyl nucleotide
  modified_base 8..11: mod_base = OTHER; note = 2'-Fluoro nucleotide
  modified_base 12..27: mod_base = OTHER; note = 2'-O-methyl nucleotide
  modified_base 28..30: mod_base = OTHER; note = aminodiethoxymethanol-adenosine-N-acetylgalactosamine
  modified_base 31..36: mod_base = OTHER; note = 2'-O-methyl nucleotide
  source 1..36: mol_type = other RNA

SEQ ID NO: 1001 - RNA, 22 nt, synthetic construct
  misc_feature 1..22: note = Synthetic: CD274-0088
  modified_base 1: mod_base = OTHER; note = 4'-O-monomethylphosphonate-2'-O-methylmethyluridine
  modified_base 2..3: mod_base = OTHER; note = 2'-Fluoro nucleotide linked via phosphorothioate
  modified_base 4..5: mod_base = OTHER; note = 2'-Fluoro nucleotide
  modified_base 6: mod_base = OTHER; note = 2'-O-methyl nucleotide
  modified_base 7: mod_base = OTHER; note = 2'-Fluoro nucleotide
  modified_base 8..9: mod_base = OTHER; note = 2'-O-methyl nucleotide
  modified_base 10: mod_base = OTHER; note = 2'-Fluoro nucleotide
  modified_base 11..13: mod_base = OTHER; note = 2'-O-methyl nucleotide
  modified_base 14: mod_base = OTHER; note = 2'-Fluoro nucleotide
  modified_base 15..19: mod_base = OTHER; note = 2'-O-methyl nucleotide
  modified_base 20..21: mod_base = OTHER; note = 2'-O-methyl nucleotide linked via phosphorothioate
  modified_base 22: mod_base = OTHER; note = 2'-O-methyl nucleotide
  source 1..22: mol_type = other RNA
tcaaatatcctcatctttctgg

SEQ ID NO: 1002 - RNA, 22 nt, synthetic construct
  misc_feature 1..22: note = Synthetic: CD274-0094
  modified_base 1: mod_base = OTHER; note = 4'-O-monomethylphosphonate-2'-O-methylmethyluridine
  modified_base 2..3: mod_base = OTHER; note = 2'-Fluoro nucleotide linked via phosphorothioate
  modified_base 4..5: mod_base = OTHER; note = 2'-Fluoro nucleotide
  modified_base 6: mod_base = OTHER; note = 2'-O-methyl nucleotide
  modified_base 7: mod_base = OTHER; note = 2'-Fluoro nucleotide
  modified_base 8..9: mod_base = OTHER; note = 2'-O-methyl nucleotide
  modified_base 10: mod_base = OTHER; note = 2'-Fluoro nucleotide
  modified_base 11..13: mod_base = OTHER; note = 2'-O-methyl nucleotide
  modified_base 14: mod_base = OTHER; note = 2'-Fluoro nucleotide
  modified_base 15..19: mod_base = OTHER; note = 2'-O-methyl nucleotide
  modified_base 20..21: mod_base = OTHER; note = 2'-O-methyl nucleotide linked via phosphorothioate
  modified_base 22: mod_base = OTHER; note = 2'-O-methyl nucleotide
  source 1..22: mol_type = other RNA
tagacagcaaatatcctcatgg

SEQ ID NO: 1003 - skipped

SEQ ID NO: 1004 - RNA, 22 nt, synthetic construct
  misc_feature 1..22: note = Synthetic: CD274-0097
  modified_base 1: mod_base = OTHER; note = 4'-O-monomethylphosphonate-2'-O-methylmethyluridine
  modified_base 2..3: mod_base = OTHER; note = 2'-Fluoro nucleotide linked via phosphorothioate
  modified_base 4..5: mod_base = OTHER; note = 2'-Fluoro nucleotide
  modified_base 6: mod_base = OTHER; note = 2'-O-methyl nucleotide
  modified_base 7: mod_base = OTHER; note = 2'-Fluoro nucleotide
  modified_base 8..9: mod_base = OTHER; note = 2'-O-methyl nucleotide
  modified_base 10: mod_base = OTHER; note = 2'-Fluoro nucleotide
  modified_base 11..13: mod_base = OTHER; note = 2'-O-methyl nucleotide
  modified_base 14: mod_base = OTHER; note = 2'-Fluoro nucleotide
  modified_base 15..19: mod_base = OTHER; note = 2'-O-methyl nucleotide
  modified_base 20..21: mod_base = OTHER; note = 2'-O-methyl nucleotide linked via phosphorothioate
  modified_base 22: mod_base = OTHER; note = 2'-O-methyl nucleotide
  source 1..22: mol_type = other RNA
ttaaagacagcaaatatcctgg

SEQ ID NO: 1005 - RNA, 22 nt, synthetic construct
  misc_feature 1..22: note = Synthetic: CD274-0098
  modified_base 1: mod_base = OTHER; note = 4'-O-monomethylphosphonate-2'-O-methylmethyluridine
  modified_base 2..3: mod_base = OTHER; note = 2'-Fluoro nucleotide linked via phosphorothioate
  modified_base 4..5: mod_base = OTHER; note = 2'-Fluoro nucleotide
  modified_base 6: mod_base = OTHER; note = 2'-O-methyl nucleotide
  modified_base 7: mod_base = OTHER; note = 2'-Fluoro nucleotide
  modified_base 8..9: mod_base = OTHER; note = 2'-O-methyl nucleotide
  modified_base 10: mod_base = OTHER; note = 2'-Fluoro nucleotide
  modified_base 11..13: mod_base = OTHER; note = 2'-O-methyl nucleotide
  modified_base 14: mod_base = OTHER; note = 2'-Fluoro nucleotide
  modified_base 15..19: mod_base = OTHER; note = 2'-O-methyl nucleotide
  modified_base 20..21: mod_base = OTHER; note = 2'-O-methyl nucleotide linked via phosphorothioate
  modified_base 22: mod_base = OTHER; note = 2'-O-methyl nucleotide
  source 1..22: mol_type = other RNA
tataaagacagcaaatatccgg

SEQ ID NO: 1006 - RNA, 22 nt, synthetic construct
  misc_feature 1..22: note = Synthetic: CD274-0100
  modified_base 1: mod_base = OTHER; note = 4'-O-monomethylphosphonate-2'-O-methylmethyluridine
  modified_base 2..3: mod_base = OTHER; note = 2'-Fluoro nucleotide linked via phosphorothioate
  modified_base 4..5: mod_base = OTHER; note = 2'-Fluoro nucleotide
  modified_base 6: mod_base = OTHER; note = 2'-O-methyl nucleotide
  modified_base 7: mod_base = OTHER; note = 2'-Fluoro nucleotide
  modified_base 8..9: mod_base = OTHER; note = 2'-O-methyl nucleotide
  modified_base 10: mod_base = OTHER; note = 2'-Fluoro nucleotide
  modified_base 11..13: mod_base = OTHER; note = 2'-O-methyl nucleotide
  modified_base 14: mod_base = OTHER; note = 2'-Fluoro nucleotide
  modified_base 15..19: mod_base = OTHER; note = 2'-O-methyl nucleotide
  modified_base 20..21: mod_base = OTHER; note = 2'-O-methyl nucleotide linked via phosphorothioate
  modified_base 22: mod_base = OTHER; note = 2'-O-methyl nucleotide
  source 1..22: mol_type = other RNA
tatataaagacagcaaatatgg

SEQ ID NO: 1007 - RNA, 22 nt, synthetic construct
  misc_feature 1..22: note = Synthetic: CD274-0102
  modified_base 1: mod_base = OTHER; note = 4'-O-monomethylphosphonate-2'-O-methylmethyluridine
  modified_base 2..3: mod_base = OTHER; note = 2'-Fluoro nucleotide linked via phosphorothioate
  modified_base 4..5: mod_base = OTHER; note = 2'-Fluoro nucleotide
  modified_base 6: mod_base = OTHER; note = 2'-O-methyl nucleotide
  modified_base 7: mod_base = OTHER; note = 2'-Fluoro nucleotide
  modified_base 8..9: mod_base = OTHER; note = 2'-O-methyl nucleotide
  modified_base 10: mod_base = OTHER; note = 2'-Fluoro nucleotide
  modified_base 11..13: mod_base = OTHER; note = 2'-O-methyl nucleotide
  modified_base 14: mod_base = OTHER; note = 2'-Fluoro nucleotide
  modified_base 15..19: mod_base = OTHER; note = 2'-O-methyl nucleotide
  modified_base 20..21: mod_base = OTHER; note = 2'-O-methyl nucleotide linked via phosphorothioate
  modified_base 22: mod_base = OTHER; note = 2'-O-methyl nucleotide
  source 1..22: mol_type = other RNA
tgaatataaagacagcaaatgg

SEQ ID NO: 1008 - RNA, 22 nt, synthetic construct
  misc_feature 1..22: note = Synthetic: CD274-0167
  modified_base 1: mod_base = OTHER; note = 4'-O-monomethylphosphonate-2'-O-methylmethyluridine
  modified_base 2..3: mod_base = OTHER; note = 2'-Fluoro nucleotide linked via phosphorothioate
  modified_base 4..5: mod_base = OTHER; note = 2'-Fluoro nucleotide
  modified_base 6: mod_base = OTHER; note = 2'-O-methyl nucleotide
  modified_base 7: mod_base = OTHER; note = 2'-Fluoro nucleotide
  modified_base 8..9: mod_base = OTHER; note = 2'-O-methyl nucleotide
  modified_base 10: mod_base = OTHER; note = 2'-Fluoro nucleotide
  modified_base 11..13: mod_base = OTHER; note = 2'-O-methyl nucleotide
  modified_base 14: mod_base = OTHER; note = 2'-Fluoro nucleotide
  modified_base 15..19: mod_base = OTHER; note = 2'-O-methyl nucleotide
  modified_base 20..21: mod_base = OTHER; note = 2'-O-methyl nucleotide linked via phosphorothioate
  modified_base 22: mod_base = OTHER; note = 2'-O-methyl nucleotide
  source 1..22: mol_type = other RNA
ttctaccacatataggtcctgg

SEQ ID NO: 1009 - RNA, 22 nt, synthetic construct
  misc_feature 1..22: note = Synthetic: CD274-0193
  modified_base 1: mod_base = OTHER; note = 4'-O-monomethylphosphonate-2'-O-methylmethyluridine
  modified_base 2..3: mod_base = OTHER; note = 2'-Fluoro nucleotide linked via phosphorothioate
  modified_base 4..5: mod_base = OTHER; note = 2'-Fluoro nucleotide
  modified_base 6: mod_base = OTHER; note = 2'-O-methyl nucleotide
  modified_base 7: mod_base = OTHER; note = 2'-Fluoro nucleotide
  modified_base 8..9: mod_base = OTHER; note = 2'-O-methyl nucleotide
  modified_base 10: mod_base = OTHER; note = 2'-Fluoro nucleotide
  modified_base 11..13: mod_base = OTHER; note = 2'-O-methyl nucleotide
  modified_base 14: mod_base = OTHER; note = 2'-Fluoro nucleotide
  modified_base 15..19: mod_base = OTHER; note = 2'-O-methyl nucleotide
  modified_base 20..21: mod_base = OTHER; note = 2'-O-methyl nucleotide linked via phosphorothioate
  modified_base 22: mod_base = OTHER; note = 2'-O-methyl nucleotide
  source 1..22: mol_type = other RNA
tcattcaattgtcatattgcgg

SEQ ID NO: 1010 - RNA, 22 nt, synthetic construct
  misc_feature 1..22: note = Synthetic: CD274-0194
  modified_base 1: mod_base = OTHER; note = 4'-O-monomethylphosphonate-2'-O-methylmethyluridine
  modified_base 2..3: mod_base = OTHER; note = 2'-Fluoro nucleotide linked via phosphorothioate
  modified_base 4..5: mod_base = OTHER; note = 2'-Fluoro nucleotide
  modified_base 6: mod_base = OTHER; note = 2'-O-methyl nucleotide
  modified_base 7: mod_base = OTHER; note = 2'-Fluoro nucleotide
  modified_base 8..9: mod_base = OTHER; note = 2'-O-methyl nucleotide
  modified_base 10: mod_base = OTHER; note = 2'-Fluoro nucleotide
  modified_base 11..13: mod_base = OTHER; note = 2'-O-methyl nucleotide
  modified_base 14: mod_base = OTHER; note = 2'-Fluoro nucleotide
  modified_base 15..19: mod_base = OTHER; note = 2'-O-methyl nucleotide
  modified_base 20..21: mod_base = OTHER; note = 2'-O-methyl nucleotide linked via phosphorothioate
  modified_base 22: mod_base = OTHER; note = 2'-O-methyl nucleotide
  source 1..22: mol_type = other RNA
tttgcattcaattgtcatatgg

SEQ ID NO: 1011 - RNA, 22 nt, synthetic construct
  misc_feature 1..22: note = Synthetic: CD274-0197
  modified_base 1: mod_base = OTHER; note = 4'-O-monomethylphosphonate-2'-O-methylmethyluridine
  modified_base 2..3: mod_base = OTHER; note = 2'-Fluoro nucleotide linked via phosphorothioate
  modified_base 4..5: mod_base = OTHER; note = 2'-Fluoro nucleotide
  modified_base 6: mod_base = OTHER; note = 2'-O-methyl nucleotide
  modified_base 7: mod_base = OTHER; note = 2'-Fluoro nucleotide
  modified_base 8..9: mod_base = OTHER; note = 2'-O-methyl nucleotide
  modified_base 10: mod_base = OTHER; note = 2'-Fluoro nucleotide
  modified_base 11..13: mod_base = OTHER; note = 2'-O-methyl nucleotide
  modified_base 14: mod_base = OTHER; note = 2'-Fluoro nucleotide
  modified_base 15..19: mod_base = OTHER; note = 2'-O-methyl nucleotide
  modified_base 20..21: mod_base = OTHER; note = 2'-O-methyl nucleotide linked via phosphorothioate
  modified_base 22: mod_base = OTHER; note = 2'-O-methyl nucleotide
  source 1..22: mol_type = other RNA
taatttgcattcaattgtcagg

SEQ ID NO: 1012 - RNA, 22 nt, synthetic construct
  misc_feature 1..22: note = Synthetic: CD274-0200
  modified_base 1: mod_base = OTHER; note = 4'-O-monomethylphosphonate-2'-O-methylmethyluridine
  modified_base 2..3: mod_base = OTHER; note = 2'-Fluoro nucleotide linked via phosphorothioate
  modified_base 4..5: mod_base = OTHER; note = 2'-Fluoro nucleotide
  modified_base 6: mod_base = OTHER; note = 2'-O-methyl nucleotide
  modified_base 7: mod_base = OTHER; note = 2'-Fluoro nucleotide
  modified_base 8..9: mod_base = OTHER; note = 2'-O-methyl nucleotide
  modified_base 10: mod_base = OTHER; note = 2'-Fluoro nucleotide
  modified_base 11..13: mod_base = OTHER; note = 2'-O-methyl nucleotide
  modified_base 14: mod_base = OTHER; note = 2'-Fluoro nucleotide
  modified_base 15..19: mod_base = OTHER; note = 2'-O-methyl nucleotide
  modified_base 20..21: mod_base = OTHER; note = 2'-O-methyl nucleotide linked via phosphorothioate
  modified_base 22: mod_base = OTHER; note = 2'-O-methyl nucleotide
  source 1..22: mol_type = other RNA
ttgggaatttgcattcaattgg

SEQ ID NO: 1013 - RNA, 22 nt, synthetic construct
  misc_feature 1..22: note = Synthetic: CD274-0204
  modified_base 1: mod_base = OTHER; note = 4'-O-monomethylphosphonate-2'-O-methylmethyluridine
  modified_base 2..3: mod_base = OTHER; note = 2'-Fluoro nucleotide linked via phosphorothioate
  modified_base 4..5: mod_base = OTHER; note = 2'-Fluoro nucleotide
  modified_base 6: mod_base = OTHER; note = 2'-O-methyl nucleotide
  modified_base 7: mod_base = OTHER; note = 2'-Fluoro nucleotide
  modified_base 8..9: mod_base = OTHER; note = 2'-O-methyl nucleotide
  modified_base 10: mod_base = OTHER; note = 2'-Fluoro nucleotide
  modified_base 11..13: mod_base = OTHER; note = 2'-O-methyl nucleotide
  modified_base 14: mod_base = OTHER; note = 2'-Fluoro nucleotide
  modified_base 15..19: mod_base = OTHER; note = 2'-O-methyl nucleotide
  modified_base 20..21: mod_base = OTHER; note = 2'-O-methyl nucleotide linked via phosphorothioate
  modified_base 22: mod_base = OTHER; note = 2'-O-methyl nucleotide
  source 1..22: mol_type = other RNA
ttaattgtttttctactggggg

SEQ ID NO: 1014 - RNA, 22 nt, synthetic construct
  misc_feature 1..22: note = Synthetic: CD274-0219
  modified_base 1: mod_base = OTHER; note = 4'-O-monomethylphosphonate-2'-O-methylmethyluridine
  modified_base 2..3: mod_base = OTHER; note = 2'-Fluoro nucleotide linked via phosphorothioate
  modified_base 4..5: mod_base = OTHER; note = 2'-Fluoro nucleotide
  modified_base 6: mod_base = OTHER; note = 2'-O-methyl nucleotide
  modified_base 7: mod_base = OTHER; note = 2'-Fluoro nucleotide
  modified_base 8..9: mod_base = OTHER; note = 2'-O-methyl nucleotide
  modified_base 10: mod_base = OTHER; note = 2'-Fluoro nucleotide
  modified_base 11..13: mod_base = OTHER; note = 2'-O-methyl nucleotide
  modified_base 14: mod_base = OTHER; note = 2'-Fluoro nucleotide
  modified_base 15..19: mod_base = OTHER; note = 2'-O-methyl nucleotide
  modified_base 20..21: mod_base = OTHER; note = 2'-O-methyl nucleotide linked via phosphorothioate
  modified_base 22: mod_base = OTHER; note = 2'-O-methyl nucleotide
  source 1..22: mol_type = other RNA
tgtctaattgtttttctactgg

SEQ ID NO: 1015 - RNA, 22 nt, synthetic construct
  misc_feature 1..22: note = Synthetic: CD274-0222
  modified_base 1: mod_base = OTHER; note = 4'-O-monomethylphosphonate-2'-O-methylmethyluridine
  modified_base 2..3: mod_base = OTHER; note = 2'-Fluoro nucleotide linked via phosphorothioate
  modified_base 4..5: mod_base = OTHER; note = 2'-Fluoro nucleotide
  modified_base 6: mod_base = OTHER; note = 2'-O-methyl nucleotide
  modified_base 7: mod_base = OTHER; note = 2'-Fluoro nucleotide
  modified_base 8..9: mod_base = OTHER; note = 2'-O-methyl nucleotide
  modified_base 10: mod_base = OTHER; note = 2'-Fluoro nucleotide
  modified_base 11..13: mod_base = OTHER; note = 2'-O-methyl nucleotide
  modified_base 14: mod_base = OTHER; note = 2'-Fluoro nucleotide
  modified_base 15..19: mod_base = OTHER; note = 2'-O-methyl nucleotide
  modified_base 20..21: mod_base = OTHER; note = 2'-O-methyl nucleotide linked via phosphorothioate
  modified_base 22: mod_base = OTHER; note = 2'-O-methyl nucleotide
  source 1..22: mol_type = other RNA
tcaggtctaattgtttttctgg

SEQ ID NO: 1016 - RNA, 22 nt, synthetic construct
  misc_feature 1..22: note = Synthetic: CD274-0225
  modified_base 1: mod_base = OTHER; note = 4'-O-monomethylphosphonate-2'-O-methylmethyluridine
  modified_base 2..3: mod_base = OTHER; note = 2'-Fluoro nucleotide linked via phosphorothioate
  modified_base 4..5: mod_base = OTHER; note = 2'-Fluoro nucleotide
  modified_base 6: mod_base = OTHER; note = 2'-O-methyl nucleotide
  modified_base 7: mod_base = OTHER; note = 2'-Fluoro nucleotide
  modified_base 8..9: mod_base = OTHER; note = 2'-O-methyl nucleotide
  modified_base 10: mod_base = OTHER; note = 2'-Fluoro nucleotide
  modified_base 11..13: mod_base = OTHER; note = 2'-O-methyl nucleotide
  modified_base 14: mod_base = OTHER; note = 2'-Fluoro nucleotide
  modified_base 15..19: mod_base = OTHER; note = 2'-O-methyl nucleotide
  modified_base 20..21: mod_base = OTHER; note = 2'-O-methyl nucleotide linked via phosphorothioate
  modified_base 22: mod_base = OTHER; note = 2'-O-methyl nucleotide
  source 1..22: mol_type = other RNA
ttaatgttcttatcctccatgg

SEQ ID NO: 1017 - RNA, 22 nt, synthetic construct
  misc_feature 1..22: note = Synthetic: CD274-0268
  modified_base 1: mod_base = OTHER; note = 4'-O-monomethylphosphonate-2'-O-methylmethyluridine
  modified_base 2..3: mod_base = OTHER; note = 2'-Fluoro nucleotide linked via phosphorothioate
  modified_base 4..5: mod_base = OTHER; note = 2'-Fluoro nucleotide
  modified_base 6: mod_base = OTHER; note = 2'-O-methyl nucleotide
  modified_base 7: mod_base = OTHER; note = 2'-Fluoro nucleotide
  modified_base 8..9: mod_base = OTHER; note = 2'-O-methyl nucleotide
  modified_base 10: mod_base = OTHER; note = 2'-Fluoro nucleotide
  modified_base 11..13: mod_base = OTHER; note = 2'-O-methyl nucleotide
  modified_base 14: mod_base = OTHER; note = 2'-Fluoro nucleotide
  modified_base 15..19: mod_base = OTHER; note = 2'-O-methyl nucleotide
  modified_base 20..21: mod_base = OTHER; note = 2'-O-methyl nucleotide linked via phosphorothioate
  modified_base 22: mod_base = OTHER; note = 2'-O-methyl nucleotide
  source 1..22: mol_type = other RNA
tataatgttcttatcctccagg

SEQ ID NO: 1018 - RNA, 22 nt, synthetic construct
  misc_feature 1..22: note = Synthetic: CD274-0269
  modified_base 1: mod_base = OTHER; note = 4'-O-monomethylphosphonate-2'-O-methylmethyluridine
  modified_base 2..3: mod_base = OTHER; note = 2'-Fluoro nucleotide linked via phosphorothioate
  modified_base 4..5: mod_base = OTHER; note = 2'-Fluoro nucleotide
  modified_base 6: mod_base = OTHER; note = 2'-O-methyl nucleotide
  modified_base 7: mod_base = OTHER; note = 2'-Fluoro nucleotide
  modified_base 8..9: mod_base = OTHER; note = 2'-O-methyl nucleotide
  modified_base 10: mod_base = OTHER; note = 2'-Fluoro nucleotide
  modified_base 11..13: mod_base = OTHER; note = 2'-O-methyl nucleotide
  modified_base 14: mod_base = OTHER; note = 2'-Fluoro nucleotide
  modified_base 15..19: mod_base = OTHER; note = 2'-O-methyl nucleotide
  modified_base 20..21: mod_base = OTHER; note = 2'-O-methyl nucleotide linked via phosphorothioate
  modified_base 22: mod_base = OTHER; note = 2'-O-methyl nucleotide
  source 1..22: mol_type = other RNA
tgaataatgttcttatcctcgg

SEQ ID NO: 1019 - RNA, 22 nt, synthetic construct
  misc_feature 1..22: note = Synthetic: CD274-0271
  modified_base 1: mod_base = OTHER; note = 4'-O-monomethylphosphonate-2'-O-methylmethyluridine
  modified_base 2..3: mod_base = OTHER; note = 2'-Fluoro nucleotide linked via phosphorothioate
  modified_base 4..5: mod_base = OTHER; note = 2'-Fluoro nucleotide
  modified_base 6: mod_base = OTHER; note = 2'-O-methyl nucleotide
  modified_base 7: mod_base = OTHER; note = 2'-Fluoro nucleotide
  modified_base 8..9: mod_base = OTHER; note = 2'-O-methyl nucleotide
  modified_base 10: mod_base = OTHER; note = 2'-Fluoro nucleotide
  modified_base 11..13: mod_base = OTHER; note = 2'-O-methyl nucleotide
  modified_base 14: mod_base = OTHER; note = 2'-Fluoro nucleotide
  modified_base 15..19: mod_base = OTHER; note = 2'-O-methyl nucleotide
  modified_base 20..21: mod_base = OTHER; note = 2'-O-methyl nucleotide linked via phosphorothioate
  modified_base 22: mod_base = OTHER; note = 2'-O-methyl nucleotide
  source 1..22: mol_type = other RNA
tattcaattgtcatattgctgg

SEQ ID NO: 1020 - RNA, 22 nt, synthetic construct
  misc_feature 1..22: note = Synthetic: CD274-0274
  modified_base 1: mod_base = OTHER; note = 4'-O-monomethylphosphonate-2'-O-methylmethyluridine
  modified_base 2..3: mod_base = OTHER; note = 2'-Fluoro nucleotide linked via phosphorothioate
  modified_base 4..5: mod_base = OTHER; note = 2'-Fluoro nucleotide
  modified_base 6: mod_base = OTHER; note = 2'-O-methyl nucleotide
  modified_base 7: mod_base = OTHER; note = 2'-Fluoro nucleotide
  modified_base 8..9: mod_base = OTHER; note = 2'-O-methyl nucleotide
  modified_base 10: mod_base = OTHER; note = 2'-Fluoro nucleotide
  modified_base 11..13: mod_base = OTHER; note = 2'-O-methyl nucleotide
  modified_base 14: mod_base = OTHER; note = 2'-Fluoro nucleotide
  modified_base 15..19: mod_base = OTHER; note = 2'-O-methyl nucleotide
  modified_base 20..21: mod_base = OTHER; note = 2'-O-methyl nucleotide linked via phosphorothioate
  modified_base 22: mod_base = OTHER; note = 2'-O-methyl nucleotide
  source 1..22: mol_type = other RNA
tattgaataatgttcttatcgg

SEQ ID NO: 1021 - RNA, 22 nt, synthetic construct
  misc_feature 1..22: note = Synthetic: CD274-0275
  modified_base 1: mod_base = OTHER; note = 4'-O-monomethylphosphonate-2'-O-methylmethyluridine
  modified_base 2..3: mod_base = OTHER; note = 2'-Fluoro nucleotide linked via phosphorothioate
  modified_base 4..5: mod_base = OTHER; note = 2'-Fluoro nucleotide
  modified_base 6: mod_base = OTHER; note = 2'-O-methyl nucleotide
  modified_base 7: mod_base = OTHER; note = 2'-Fluoro nucleotide
  modified_base 8..9: mod_base = OTHER; note = 2'-O-methyl nucleotide
  modified_base 10: mod_base = OTHER; note = 2'-Fluoro nucleotide
  modified_base 11..13: mod_base = OTHER; note = 2'-O-methyl nucleotide
  modified_base 14: mod_base = OTHER; note = 2'-Fluoro nucleotide
  modified_base 15..19: mod_base = OTHER; note = 2'-O-methyl nucleotide
  modified_base 20..21: mod_base = OTHER; note = 2'-O-methyl nucleotide linked via phosphorothioate
  modified_base 22: mod_base = OTHER; note = 2'-O-methyl nucleotide
  source 1..22: mol_type = other RNA
taattgaataatgttcttatgg

SEQ ID NO: 1022 - RNA, 22 nt, synthetic construct
  misc_feature 1..22: note = Synthetic: CD274-0277
  modified_base 1: mod_base = OTHER; note = 4'-O-monomethylphosphonate-2'-O-methylmethyluridine
  modified_base 2..3: mod_base = OTHER; note = 2'-Fluoro nucleotide linked via phosphorothioate
  modified_base 4..5: mod_base = OTHER; note = 2'-Fluoro nucleotide
  modified_base 6: mod_base = OTHER; note = 2'-O-methyl nucleotide
  modified_base 7: mod_base = OTHER; note = 2'-Fluoro nucleotide
  modified_base 8..9: mod_base = OTHER; note = 2'-O-methyl nucleotide
  modified_base 10: mod_base = OTHER; note = 2'-Fluoro nucleotide
  modified_base 11..13: mod_base = OTHER; note = 2'-O-methyl nucleotide
  modified_base 14: mod_base = OTHER; note = 2'-Fluoro nucleotide
  modified_base 15..19: mod_base = OTHER; note = 2'-O-methyl nucleotide
  modified_base 20..21: mod_base = OTHER; note = 2'-O-methyl nucleotide linked via phosphorothioate
  modified_base 22: mod_base = OTHER; note = 2'-O-methyl nucleotide
  source 1..22: mol_type = other RNA
tcaaattgaataatgttcttgg

SEQ ID NO: 1023 - RNA, 22 nt, synthetic construct
  misc_feature 1..22: note = Synthetic: CD274-0282
  modified_base 1: mod_base = OTHER; note = 4'-O-monomethylphosphonate-2'-O-methylmethyluridine
  modified_base 2..3: mod_base = OTHER; note = 2'-Fluoro nucleotide linked via phosphorothioate
  modified_base 4..5: mod_base = OTHER; note = 2'-Fluoro nucleotide
  modified_base 6: mod_base = OTHER; note = 2'-O-methyl nucleotide
  modified_base 7: mod_base = OTHER; note = 2'-Fluoro nucleotide
  modified_base 8..9: mod_base = OTHER; note = 2'-O-methyl nucleotide
  modified_base 10: mod_base = OTHER; note = 2'-Fluoro nucleotide
  modified_base 11..13: mod_base = OTHER; note = 2'-O-methyl nucleotide
  modified_base 14: mod_base = OTHER; note = 2'-Fluoro nucleotide
  modified_base 15..19: mod_base = OTHER; note = 2'-O-methyl nucleotide
  modified_base 20..21: mod_base = OTHER; note = 2'-O-methyl nucleotide linked via phosphorothioate
  modified_base 22: mod_base = OTHER; note = 2'-O-methyl nucleotide
  source 1..22: mol_type = other RNA
tatgcacaaattgaataatggg

SEQ ID NO: 1024 - RNA, 22 nt, synthetic construct
  misc_feature 1..22: note = Synthetic: CD274-0283
  modified_base 1: mod_base = OTHER; note = 4'-O-monomethylphosphonate-2'-O-methylmethyluridine
  modified_base 2..3: mod_base = OTHER; note = 2'-Fluoro nucleotide linked via phosphorothioate
  modified_base 4..5: mod_base = OTHER; note = 2'-Fluoro nucleotide
  modified_base 6: mod_base = OTHER; note = 2'-O-methyl nucleotide
  modified_base 7: mod_base = OTHER; note = 2'-Fluoro nucleotide
  modified_base 8..9: mod_base = OTHER; note = 2'-O-methyl nucleotide
  modified_base 10: mod_base = OTHER; note = 2'-Fluoro nucleotide
  modified_base 11..13: mod_base = OTHER; note = 2'-O-methyl nucleotide
  modified_base 14: mod_base = OTHER; note = 2'-Fluoro nucleotide
  modified_base 15..19: mod_base = OTHER; note = 2'-O-methyl nucleotide
  modified_base 20..21: mod_base = OTHER; note = 2'-O-methyl nucleotide linked via phosphorothioate
  modified_base 22: mod_base = OTHER; note = 2'-O-methyl nucleotide
  source 1..22: mol_type = other RNA
tcatgcacaaattgaataatgg

SEQ ID NO: 1025 - RNA, 22 nt, synthetic construct
  misc_feature 1..22: note = Synthetic: CD274-0394
  modified_base 1: mod_base = OTHER; note = 4'-O-monomethylphosphonate-2'-O-methylmethyluridine
  modified_base 2..3: mod_base = OTHER; note = 2'-Fluoro nucleotide linked via phosphorothioate
  modified_base 4..5: mod_base = OTHER; note = 2'-Fluoro nucleotide
  modified_base 6: mod_base = OTHER; note = 2'-O-methyl nucleotide
  modified_base 7: mod_base = OTHER; note = 2'-Fluoro nucleotide
  modified_base 8..9: mod_base = OTHER; note = 2'-O-methyl nucleotide
  modified_base 10: mod_base = OTHER; note = 2'-Fluoro nucleotide
  modified_base 11..13: mod_base = OTHER; note = 2'-O-methyl nucleotide
  modified_base 14: mod_base = OTHER; note = 2'-Fluoro nucleotide
  modified_base 15..19: mod_base = OTHER; note = 2'-O-methyl nucleotide
  modified_base 20..21: mod_base = OTHER; note = 2'-O-methyl nucleotide linked via phosphorothioate
  modified_base 22: mod_base = OTHER; note = 2'-O-methyl nucleotide
  source 1..22: mol_type = other RNA
tgcaatttcacatctgtgatgg

SEQ ID NO: 1026 - RNA, 22 nt, synthetic construct
  misc_feature 1..22: note = Synthetic: CD274-0399
  modified_base 1: mod_base = OTHER; note = 4'-O-monomethylphosphonate-2'-O-methylmethyluridine
  modified_base 2..3: mod_base = OTHER; note = 2'-Fluoro nucleotide linked via phosphorothioate
  modified_base 4..5: mod_base = OTHER; note = 2'-Fluoro nucleotide
  modified_base 6: mod_base = OTHER; note = 2'-O-methyl nucleotide
  modified_base 7: mod_base = OTHER; note = 2'-Fluoro nucleotide
  modified_base 8..9: mod_base = OTHER; note = 2'-O-methyl nucleotide
  modified_base 10: mod_base = OTHER; note = 2'-Fluoro nucleotide
  modified_base 11..13: mod_base = OTHER; note = 2'-O-methyl nucleotide
  modified_base 14: mod_base = OTHER; note = 2'-Fluoro nucleotide
  modified_base 15..19: mod_base = OTHER; note = 2'-O-methyl nucleotide
  modified_base 20..21: mod_base = OTHER; note = 2'-O-methyl nucleotide linked via phosphorothioate
  modified_base 22: mod_base = OTHER; note = 2'-O-methyl nucleotide
  source 1..22: mol_type = other RNA
tatcctgcaatttcacatctgg

SEQ ID NO: 1027 - RNA, 22 nt, synthetic construct
  misc_feature 1..22: note = Synthetic: CD274-0530
  modified_base 1: mod_base = OTHER; note = 4'-O-monomethylphosphonate-2'-O-methylmethyluridine
  modified_base 2..3: mod_base = OTHER; note = 2'-Fluoro nucleotide linked via phosphorothioate
  modified_base 4..5: mod_base = OTHER; note = 2'-Fluoro nucleotide
  modified_base 6: mod_base = OTHER; note = 2'-O-methyl nucleotide
  modified_base 7: mod_base = OTHER; note = 2'-Fluoro nucleotide
  modified_base 8..9: mod_base = OTHER; note = 2'-O-methyl nucleotide
  modified_base 10: mod_base = OTHER; note = 2'-Fluoro nucleotide
  modified_base 11..13: mod_base = OTHER; note = 2'-O-methyl nucleotide
  modified_base 14: mod_base = OTHER; note = 2'-Fluoro nucleotide
  modified_base 15..19: mod_base = OTHER; note = 2'-O-methyl nucleotide
  modified_base 20..21: mod_base = OTHER; note = 2'-O-methyl nucleotide linked via phosphorothioate
  modified_base 22: mod_base = OTHER; note = 2'-O-methyl nucleotide
  source 1..22: mol_type = other RNA
ttcatgttcagaggtgactggg

SEQ ID NO: 1028 - RNA, 22 nt, synthetic construct
  misc_feature 1..22: note = Synthetic: CD274-0531
  modified_base 1: mod_base = OTHER; note = 4'-O-monomethylphosphonate-2'-O-methylmethyluridine
  modified_base 2..3: mod_base = OTHER; note = 2'-Fluoro nucleotide linked via phosphorothioate
  modified_base 4..5: mod_base = OTHER; note = 2'-Fluoro nucleotide
  modified_base 6: mod_base = OTHER; note = 2'-O-methyl nucleotide
  modified_base 7: mod_base = OTHER; note = 2'-Fluoro nucleotide
  modified_base 8..9: mod_base = OTHER; note = 2'-O-methyl nucleotide
  modified_base 10: mod_base = OTHER; note = 2'-Fluoro nucleotide
  modified_base 11..13: mod_base = OTHER; note = 2'-O-methyl nucleotide
  modified_base 14: mod_base = OTHER; note = 2'-Fluoro nucleotide
  modified_base 15..19: mod_base = OTHER; note = 2'-O-methyl nucleotide
  modified_base 20..21: mod_base = OTHER; note = 2'-O-methyl nucleotide linked via phosphorothioate
  modified_base 22: mod_base = OTHER; note = 2'-O-methyl nucleotide
  source 1..22: mol_type = other RNA
tttcatgttcagaggtgactgg

SEQ ID NO: 1029 - RNA, 22 nt, synthetic construct
  misc_feature 1..22: note = Synthetic: CD274-0653
  modified_base 1: mod_base = OTHER; note = 4'-O-monomethylphosphonate-2'-O-methylmethyluridine
  modified_base 2..3: mod_base = OTHER; note = 2'-Fluoro nucleotide linked via phosphorothioate
  modified_base 4..5: mod_base = OTHER; note = 2'-Fluoro nucleotide
  modified_base 6: mod_base = OTHER; note = 2'-O-methyl nucleotide
  modified_base 7: mod_base = OTHER; note = 2'-Fluoro nucleotide
  modified_base 8..9: mod_base = OTHER; note = 2'-O-methyl nucleotide
  modified_base 10: mod_base = OTHER; note = 2'-Fluoro nucleotide
  modified_base 11..13: mod_base = OTHER; note = 2'-O-methyl nucleotide
  modified_base 14: mod_base = OTHER; note = 2'-Fluoro nucleotide
  modified_base 15..19: mod_base = OTHER; note = 2'-O-methyl nucleotide
  modified_base 20..21: mod_base = OTHER; note = 2'-O-methyl nucleotide linked via phosphorothioate
  modified_base 22: mod_base = OTHER; note = 2'-O-methyl nucleotide
  source 1..22: mol_type = other RNA
tacattgaaaagcttctcctgg

SEQ ID NO: 1030 - RNA, 22 nt, synthetic construct
  misc_feature 1..22: note = Synthetic: CD274-0673
  modified_base 1: mod_base = OTHER; note = 4'-O-monomethylphosphonate-2'-O-methylmethyluridine
  modified_base 2..3: mod_base = OTHER; note = 2'-Fluoro nucleotide linked via phosphorothioate
  modified_base 4..5: mod_base = OTHER; note = 2'-Fluoro nucleotide
  modified_base 6: mod_base = OTHER; note = 2'-O-methyl nucleotide
  modified_base 7: mod_base = OTHER; note = 2'-Fluoro nucleotide
  modified_base 8..9: mod_base = OTHER; note = 2'-O-methyl nucleotide
  modified_base 10: mod_base = OTHER; note = 2'-Fluoro nucleotide
  modified_base 11..13: mod_base = OTHER; note = 2'-O-methyl nucleotide
  modified_base 14: mod_base = OTHER; note = 2'-Fluoro nucleotide
  modified_base 15..19: mod_base = OTHER; note = 2'-O-methyl nucleotide
  modified_base 20..21: mod_base = OTHER; note = 2'-O-methyl nucleotide linked via phosphorothioate
  modified_base 22: mod_base = OTHER; note = 2'-O-methyl nucleotide
  source 1..22: mol_type = other RNA
ttgattctcagtgtgctggtgg

SEQ ID NO: 1031 - RNA, 22 nt, synthetic construct
  misc_feature 1..22: note = Synthetic: CD274-0693
  modified_base 1: mod_base = OTHER; note = 4'-O-monomethylphosphonate-2'-O-methylmethyluridine
  modified_base 2..3: mod_base = OTHER; note = 2'-Fluoro nucleotide linked via phosphorothioate
  modified_base 4..5: mod_base = OTHER; note = 2'-Fluoro nucleotide
  modified_base 6: mod_base = OTHER; note = 2'-O-methyl nucleotide
  modified_base 7: mod_base = OTHER; note = 2'-Fluoro nucleotide
  modified_base 8..9: mod_base = OTHER; note = 2'-O-methyl nucleotide
  modified_base 10: mod_base = OTHER; note = 2'-Fluoro nucleotide
  modified_base 11..13: mod_base = OTHER; note = 2'-O-methyl nucleotide
  modified_base 14: mod_base = OTHER; note = 2'-Fluoro nucleotide
  modified_base 15..19: mod_base = OTHER; note = 2'-O-methyl nucleotide
  modified_base 20..21: mod_base = OTHER; note = 2'-O-methyl nucleotide linked via phosphorothioate
  modified_base 22: mod_base = OTHER; note = 2'-O-methyl nucleotide
  source 1..22: mol_type = other RNA
taatctcattagttgttgtggg

SEQ ID NO: 1032 - RNA, 22 nt, synthetic construct
  misc_feature 1..22: note = Synthetic: CD274-0697
  modified_base 1: mod_base = OTHER; note = 4'-O-monomethylphosphonate-2'-O-methylmethyluridine
  modified_base 2..3: mod_base = OTHER; note = 2'-Fluoro nucleotide linked via phosphorothioate
  modified_base 4..5: mod_base = OTHER; note = 2'-Fluoro nucleotide
  modified_base 6: mod_base = OTHER; note = 2'-O-methyl nucleotide
  modified_base 7: mod_base = OTHER; note = 2'-Fluoro nucleotide
  modified_base 8..9: mod_base = OTHER; note = 2'-O-methyl nucleotide
  modified_base 10: mod_base = OTHER; note = 2'-Fluoro nucleotide
  modified_base 11..13: mod_base = OTHER; note = 2'-O-methyl nucleotide
  modified_base 14: mod_base = OTHER; note = 2'-Fluoro nucleotide
  modified_base 15..19: mod_base = OTHER; note = 2'-O-methyl nucleotide
  modified_base 20..21: mod_base = OTHER; note = 2'-O-methyl nucleotide linked via phosphorothioate
  modified_base 22: mod_base = OTHER; note = 2'-O-methyl nucleotide
  source 1..22: mol_type = other RNA
tagaaaatctcattagttgtgg

SEQ ID NO: 1033 - RNA, 22 nt, synthetic construct
  misc_feature 1..22: note = Synthetic: CD274-0700
  modified_base 1: mod_base = OTHER; note = 4'-O-monomethylphosphonate-2'-O-methylmethyluridine
  modified_base 2..3: mod_base = OTHER; note = 2'-Fluoro nucleotide linked via phosphorothioate
  modified_base 4..5: mod_base = OTHER; note = 2'-Fluoro nucleotide
  modified_base 6: mod_base = OTHER; note = 2'-O-methyl nucleotide
  modified_base 7: mod_base = OTHER; note = 2'-Fluoro nucleotide
  modified_base 8..9: mod_base = OTHER; note = 2'-O-methyl nucleotide
  modified_base 10: mod_base = OTHER; note = 2'-Fluoro nucleotide
  modified_base 11..13: mod_base = OTHER; note = 2'-O-methyl nucleotide
  modified_base 14: mod_base = OTHER; note = 2'-Fluoro nucleotide
  modified_base 15..19: mod_base = OTHER; note = 2'-O-methyl nucleotide
  modified_base 20..21: mod_base = OTHER; note = 2'-O-methyl nucleotide linked via phosphorothioate
  modified_base 22: mod_base = OTHER; note = 2'-O-methyl nucleotide
  source 1..22: mol_type = other RNA
tagtagaaaatctcattagtgg

SEQ ID NO: 1034 - RNA, 22 nt, synthetic construct
  misc_feature 1..22: note = Synthetic: CD274-0701
  modified_base 1: mod_base = OTHER; note = 4'-O-monomethylphosphonate-2'-O-methylmethyluridine
  modified_base 2..3: mod_base = OTHER; note = 2'-Fluoro nucleotide linked via phosphorothioate
  modified_base 4..5: mod_base = OTHER; note = 2'-Fluoro nucleotide
  modified_base 6: mod_base = OTHER; note = 2'-O-methyl nucleotide
  modified_base 7: mod_base = OTHER; note = 2'-Fluoro nucleotide
  modified_base 8..9: mod_base = OTHER; note = 2'-O-methyl nucleotide
  modified_base 10: mod_base = OTHER; note = 2'-Fluoro nucleotide
  modified_base 11..13: mod_base = OTHER; note = 2'-O-methyl nucleotide
  modified_base 14: mod_base = OTHER; note = 2'-Fluoro nucleotide
  modified_base 15..19: mod_base = OTHER; note = 2'-O-methyl nucleotide
  modified_base 20..21: mod_base = OTHER; note = 2'-O-methyl nucleotide linked via phosphorothioate
  modified_base 22: mod_base = OTHER; note = 2'-O-methyl nucleotide
  source 1..22: mol_type = other RNA
tcagtagaaaatctcattaggg

SEQ ID NO: 1035 - RNA, 22 nt, synthetic construct
  misc_feature 1..22: note = Synthetic: CD274-0743
  modified_base 1: mod_base = OTHER; note = 4'-O-monomethylphosphonate-2'-O-methylmethyluridine
  modified_base 2..3: mod_base = OTHER; note = 2'-Fluoro nucleotide linked via phosphorothioate
  modified_base 4..5: mod_base = OTHER; note = 2'-Fluoro nucleotide
  modified_base 6: mod_base = OTHER; note = 2'-O-methyl nucleotide
  modified_base 7: mod_base = OTHER; note = 2'-Fluoro nucleotide
  modified_base 8..9: mod_base = OTHER; note = 2'-O-methyl nucleotide
  modified_base 10: mod_base = OTHER; note = 2'-Fluoro nucleotide
  modified_base 11..13: mod_base = OTHER; note = 2'-O-methyl nucleotide
  modified_base 14: mod_base = OTHER; note = 2'-Fluoro nucleotide
  modified_base 15..19: mod_base = OTHER; note = 2'-O-methyl nucleotide
  modified_base 20..21: mod_base = OTHER; note = 2'-O-methyl nucleotide linked via phosphorothioate
  modified_base 22: mod_base = OTHER; note = 2'-O-methyl nucleotide
  source 1..22: mol_type = other RNA
ttcagctgtatggttttcctgg

SEQ ID NO: 1036 - RNA, 22 nt, synthetic construct
  misc_feature 1..22: note = Synthetic: CD274-0746
  modified_base 1: mod_base = OTHER; note = 4'-O-monomethylphosphonate-2'-O-methylmethyluridine
  modified_base 2..3: mod_base = OTHER; note = 2'-Fluoro nucleotide linked via phosphorothioate
  modified_base 4..5: mod_base = OTHER; note = 2'-Fluoro nucleotide
  modified_base 6: mod_base = OTHER; note = 2'-O-methyl nucleotide
  modified_base 7: mod_base = OTHER; note = 2'-Fluoro nucleotide
  modified_base 8..9: mod_base = OTHER; note = 2'-O-methyl nucleotide
  modified_base 10: mod_base = OTHER; note = 2'-Fluoro nucleotide
  modified_base 11..13: mod_base = OTHER; note = 2'-O-methyl nucleotide
  modified_base 14: mod_base = OTHER; note = 2'-Fluoro nucleotide
  modified_base 15..19: mod_base = OTHER; note = 2'-O-methyl nucleotide
  modified_base 20..21: mod_base = OTHER; note = 2'-O-methyl nucleotide linked via phosphorothioate
  modified_base 22: mod_base = OTHER; note = 2'-O-methyl nucleotide
  source 1..22: mol_type = other RNA
taattcagctgtatggttttgg

SEQ ID NO: 1037 - RNA, 3634 nt, Homo sapiens
  modified_base 3..4: mod_base = OTHER; note = thymine
  modified_base 6: mod_base = OTHER; note = thymine
  modified_base 14..15: mod_base = OTHER; note = thymine
  modified_base 24: mod_base = OTHER; note = thymine
  modified_base 40..41: mod_base = OTHER; note = thymine
  modified_base 43: mod_base = OTHER; note = thymine
  modified_base 45: mod_base = OTHER; note = thymine
  modified_base 51: mod_base = OTHER; note = thymine
  modified_base 60..61: mod_base = OTHER; note = thymine
  modified_base 71: mod_base = OTHER; note = thymine
  modified_base 77: mod_base = OTHER; note = thymine
  modified_base 79..81: mod_base = OTHER; note = thymine
  modified_base 84: mod_base = OTHER; note = thymine
  modified_base 86: mod_base = OTHER; note = thymine
  modified_base 88..90: mod_base = OTHER; note = thymine
  modified_base 92: mod_base = OTHER; note = thymine
  modified_base 94..95: mod_base = OTHER; note = thymine
  modified_base 98: mod_base = OTHER; note = thymine
  modified_base 103: mod_base = OTHER; note = thymine
  modified_base 106: mod_base = OTHER; note = thymine
  modified_base 111..113: mod_base = OTHER; note = thymine
  modified_base 116: mod_base = OTHER; note = thymine
  modified_base 124..126: mod_base = OTHER; note = thymine
  modified_base 129: mod_base = OTHER; note = thymine
  modified_base 131: mod_base = OTHER; note = thymine
  modified_base 137..138: mod_base = OTHER; note = thymine
  modified_base 149: mod_base = OTHER; note = thymine
  modified_base 151: mod_base = OTHER; note = thymine
  modified_base 153: mod_base = OTHER; note = thymine
  modified_base 155: mod_base = OTHER; note = thymine
  modified_base 158: mod_base = OTHER; note = thymine
  modified_base 163: mod_base = OTHER; note = thymine
  modified_base 165: mod_base = OTHER; note = thymine
  modified_base 168: mod_base = OTHER; note = thymine
  modified_base 174: mod_base = OTHER; note = thymine
  modified_base 176: mod_base = OTHER; note = thymine
  modified_base 182..183: mod_base = OTHER; note = thymine
  modified_base 187: mod_base = OTHER; note = thymine
  modified_base 193..194: mod_base = OTHER; note = thymine
  modified_base 200: mod_base = OTHER; note = thymine
  modified_base 211..212: mod_base = OTHER; note = thymine
  modified_base 218: mod_base = OTHER; note = thymine
  modified_base 222: mod_base = OTHER; note = thymine
  modified_base 227: mod_base = OTHER; note = thymine
  modified_base 230..231: mod_base = OTHER; note = thymine
  modified_base 233: mod_base = OTHER; note = thymine
  modified_base 235: mod_base = OTHER; note = thymine
  modified_base 237..238: mod_base = OTHER; note = thymine
  modified_base 245: mod_base = OTHER; note = thymine
  modified_base 252: mod_base = OTHER; note = thymine
  modified_base 260..261: mod_base = OTHER; note = thymine
  modified_base 263..264: mod_base = OTHER; note = thymine
  modified_base 268..270: mod_base = OTHER; note = thymine
  modified_base 272: mod_base = OTHER; note = thymine
  modified_base 276: mod_base = OTHER; note = thymine
  modified_base 290: mod_base = OTHER; note = thymine
  modified_base 296..297: mod_base = OTHER; note = thymine
  modified_base 303: mod_base = OTHER; note = thymine
  modified_base 306: mod_base = OTHER; note = thymine
  modified_base 310: mod_base = OTHER; note = thymine
  modified_base 329: mod_base = OTHER; note = thymine
  modified_base 331..332: mod_base = OTHER; note = thymine
  modified_base 344: mod_base = OTHER; note = thymine
  modified_base 346: mod_base = OTHER; note = thymine
  modified_base 350: mod_base = OTHER; note = thymine
  modified_base 357: mod_base = OTHER; note = thymine
  modified_base 360: mod_base = OTHER; note = thymine
  modified_base 365..366: mod_base = OTHER; note = thymine
  modified_base 371: mod_base = OTHER; note = thymine
  modified_base 378: mod_base = OTHER; note = thymine
  modified_base 380: mod_base = OTHER; note = thymine
  modified_base 385..386: mod_base = OTHER; note = thymine
  modified_base 393: mod_base = OTHER; note = thymine
  modified_base 401: mod_base = OTHER; note = thymine
  modified_base 403: mod_base = OTHER; note = thymine
  modified_base 409: mod_base = OTHER; note = thymine
  modified_base 413: mod_base = OTHER; note = thymine
  modified_base 416: mod_base = OTHER; note = thymine
  modified_base 421: mod_base = OTHER; note = thymine
  modified_base 423: mod_base = OTHER; note = thymine
  modified_base 426: mod_base = OTHER; note = thymine
  modified_base 429: mod_base = OTHER; note = thymine
  modified_base 436: mod_base = OTHER; note = thymine
  modified_base 446..447: mod_base = OTHER; note = thymine
  modified_base 450: mod_base = OTHER; note = thymine
  modified_base 452: mod_base = OTHER; note = thymine
  modified_base 458: mod_base = OTHER; note = thymine
  modified_base 462: mod_base = OTHER; note = thymine
  modified_base 469: mod_base = OTHER; note = thymine
  modified_base 479: mod_base = OTHER; note = thymine
  modified_base 491..494: mod_base = OTHER; note = thymine
  modified_base 497..498: mod_base = OTHER; note = thymine
  modified_base 500: mod_base = OTHER; note = thymine
  modified_base 504: mod_base = OTHER; note = thymine
  modified_base 509: mod_base = OTHER; note = thymine
  modified_base 514: mod_base = OTHER; note = thymine
  modified_base 516: mod_base = OTHER; note = thymine
  modified_base 522: mod_base = OTHER; note = thymine
  modified_base 527: mod_base = OTHER; note = thymine
  modified_base 532: mod_base = OTHER; note = thymine
  modified_base 534: mod_base = OTHER; note = thymine
  modified_base 540: mod_base = OTHER; note = thymine
  modified_base 547: mod_base = OTHER; note = thymine
  modified_base 563: mod_base = OTHER; note = thymine
  modified_base 566: mod_base = OTHER; note = thymine
  modified_base 568: mod_base = OTHER; note = thymine
  modified_base 579: mod_base = OTHER; note = thymine
  modified_base 585: mod_base = OTHER; note = thymine
  modified_base 590: mod_base = OTHER; note = thymine
  modified_base 593: mod_base = OTHER; note = thymine
  modified_base 597: mod_base = OTHER; note = thymine
  modified_base 600: mod_base = OTHER; note = thymine
  modified_base 618..619: mod_base = OTHER; note = thymine
  modified_base 638..641: mod_base = OTHER; note = thymine
  modified_base 645: mod_base = OTHER; note = thymine
  modified_base 647: mod_base = OTHER; note = thymine
  modified_base 659: mod_base = OTHER; note = thymine
  modified_base 665: mod_base = OTHER; note = thymine
  modified_base 678: mod_base = OTHER; note = thymine
  modified_base 681: mod_base = OTHER; note = thymine
  modified_base 686..689: mod_base = OTHER; note = thymine
  modified_base 691: mod_base = OTHER; note = thymine
  modified_base 694: mod_base = OTHER; note = thymine
  modified_base 699..702: mod_base = OTHER; note = thymine
  modified_base 709..710: mod_base = OTHER; note = thymine
  modified_base 714: mod_base = OTHER; note = thymine
  modified_base 717: mod_base = OTHER; note = thymine
  modified_base 729: mod_base = OTHER; note = thymine
  modified_base 735: mod_base = OTHER; note = thymine
  modified_base 739..740: mod_base = OTHER; note = thymine
  modified_base 743: mod_base = OTHER; note = thymine
  modified_base 746: mod_base = OTHER; note = thymine
  modified_base 755: mod_base = OTHER; note = thymine
  modified_base 759: mod_base = OTHER; note = thymine
  modified_base 761: mod_base = OTHER; note = thymine
  modified_base 768: mod_base = OTHER; note = thymine
  modified_base 771: mod_base = OTHER; note = thymine
  modified_base 777: mod_base = OTHER; note = thymine
  modified_base 786: mod_base = OTHER; note = thymine
  modified_base 790..791: mod_base = OTHER; note = thymine
  modified_base 794: mod_base = OTHER; note = thymine
  modified_base 797..798: mod_base = OTHER; note = thymine
  modified_base 800: mod_base = OTHER; note = thymine
  modified_base 809: mod_base = OTHER; note = thymine
  modified_base 811..812: mod_base = OTHER; note = thymine
  modified_base 814..815: mod_base = OTHER; note = thymine
  modified_base 817: mod_base = OTHER; note = thymine
  modified_base 821..822: mod_base = OTHER; note = thymine
  modified_base 825: mod_base = OTHER; note = thymine
  modified_base 827: mod_base = OTHER; note = thymine
  modified_base 833: mod_base = OTHER; note = thymine
  modified_base 838..839: mod_base = OTHER; note = thymine
  modified_base 842: mod_base = OTHER; note = thymine
  modified_base 844..845: mod_base = OTHER; note = thymine
  modified_base 849..851: mod_base = OTHER; note = thymine
  modified_base 866: mod_base = OTHER; note = thymine
  modified_base 869: mod_base = OTHER; note = thymine
  modified_base 873: mod_base = OTHER; note = thymine
  modified_base 875: mod_base = OTHER; note = thymine
  modified_base 883: mod_base = OTHER; note = thymine
  modified_base 885: mod_base = OTHER; note = thymine
  modified_base 890: mod_base = OTHER; note = thymine
  modified_base 897: mod_base = OTHER; note = thymine
  modified_base 904: mod_base = OTHER; note = thymine
  modified_base 918: mod_base = OTHER; note = thymine
  modified_base 921: mod_base = OTHER; note = thymine
  modified_base 927..929: mod_base = OTHER; note = thymine
  modified_base 940: mod_base = OTHER; note = thymine
  modified_base 943: mod_base = OTHER; note = thymine
  modified_base 950..951: mod_base = OTHER; note = thymine
  modified_base 957..958: mod_base = OTHER; note = thymine
  modified_base 960: mod_base = OTHER; note = thymine
  modified_base 963: mod_base = OTHER; note = thymine
  modified_base 965..966: mod_base = OTHER; note = thymine
  modified_base 977..978: mod_base = OTHER; note = thymine
  modified_base 980: mod_base = OTHER; note = thymine
  modified_base 986: mod_base = OTHER; note = thymine
  modified_base 988: mod_base = OTHER; note = thymine
  modified_base 991..993: mod_base = OTHER; note = thymine
  modified_base 999..1000: mod_base = OTHER; note = thymine
  modified_base 1003: mod_base = OTHER; note = thymine
  modified_base 1010: mod_base = OTHER; note = thymine
  modified_base 1016: mod_base = OTHER; note = thymine
  modified_base 1032: mod_base = OTHER; note = thymine
  modified_base 1040: mod_base = OTHER; note = thymine
  modified_base 1045: mod_base = OTHER; note = thymine
  modified_base 1054: mod_base = OTHER; note = thymine
  modified_base 1056: mod_base = OTHER; note = thymine
  modified_base 1062..1063: mod_base = OTHER; note = thymine
  modified_base 1079: mod_base = OTHER; note = thymine
  modified_base 1085: mod_base = OTHER; note = thymine
  modified_base 1092: mod_base = OTHER; note = thymine
  modified_base 1114: mod_base = OTHER; note = thymine
  modified_base 1124: mod_base = OTHER; note = thymine
  modified_base 1129: mod_base = OTHER; note = thymine
  modified_base 1143: mod_base = OTHER; note = thymine
  modified_base 1155..1156: mod_base = OTHER; note = thymine
  modified_base 1159: mod_base = OTHER; note = thymine
  modified_base 1162..1164: mod_base = OTHER; note = thymine
  modified_base 1169: mod_base = OTHER; note = thymine
  modified_base 1173: mod_base = OTHER; note = thymine
  modified_base 1181: mod_base = OTHER; note = thymine
  modified_base 1184: mod_base = OTHER; note = thymine
  modified_base 1192: mod_base = OTHER; note = thymine
  modified_base 1194: mod_base = OTHER; note = thymine
  modified_base 1210: mod_base = OTHER; note = thymine
  modified_base 1213..1214: mod_base = OTHER; note = thymine
  modified_base 1216: mod_base = OTHER; note = thymine
  modified_base 1229: mod_base = OTHER; note = thymine
  modified_base 1239: mod_base = OTHER; note = thymine
  modified_base 1242: mod_base = OTHER; note = thymine
  modified_base 1246..1247: mod_base = OTHER; note = thymine
  modified_base 1250: mod_base = OTHER; note = thymine
  modified_base 1253: mod_base = OTHER; note = thymine
  modified_base 1256: mod_base = OTHER; note = thymine
  modified_base 1268..1269: mod_base = OTHER; note = thymine
  modified_base 1275: mod_base = OTHER; note = thymine
  modified_base 1279: mod_base = OTHER; note = thymine
  modified_base 1282..1284: mod_base = OTHER; note = thymine
  modified_base 1290: mod_base = OTHER; note = thymine
  modified_base 1294..1295: mod_base = OTHER; note = thymine
  modified_base 1298: mod_base = OTHER; note = thymine
  modified_base 1306: mod_base = OTHER; note = thymine
  modified_base 1311..1313: mod_base = OTHER; note = thymine
  modified_base 1317: mod_base = OTHER; note = thymine
  modified_base 1322: mod_base = OTHER; note = thymine
  modified_base 1326: mod_base = OTHER; note = thymine
  modified_base 1330: mod_base = OTHER; note = thymine
  modified_base 1334..1336: mod_base = OTHER; note = thymine
  modified_base 1338..1341: mod_base = OTHER; note = thymine
  modified_base 1343: mod_base = OTHER; note = thymine
  modified_base 1347: mod_base = OTHER; note = thymine
  modified_base 1351: mod_base = OTHER; note = thymine
  modified_base 1357: mod_base = OTHER; note = thymine
  modified_base 1359: mod_base = OTHER; note = thymine
  modified_base 1363: mod_base = OTHER; note = thymine
  modified_base 1365..1366: mod_base = OTHER; note = thymine
  modified_base 1379: mod_base = OTHER; note = thymine
  modified_base 1381..1383: mod_base = OTHER; note = thymine
  modified_base 1385: mod_base = OTHER; note = thymine
  modified_base 1387: mod_base = OTHER; note = thymine
  modified_base 1389: mod_base = OTHER; note = thymine
  modified_base 1393..1397: mod_base = OTHER; note = thymine
  modified_base 1400: mod_base = OTHER; note = thymine
  modified_base 1402..1404: mod_base = OTHER; note = thymine
  modified_base 1406..1409: mod_base = OTHER; note = thymine
  modified_base 1413: mod_base = OTHER; note = thymine
  modified_base 1415: mod_base = OTHER; note = thymine
  modified_base 1417: mod_base = OTHER; note = thymine
  modified_base 1422: mod_base = OTHER; note = thymine
  modified_base 1424..1425: mod_base = OTHER; note = thymine
  modified_base 1427..1428: mod_base = OTHER; note = thymine
  modified_base 1430: mod_base = OTHER; note = thymine
  modified_base 1433: mod_base = OTHER; note = thymine
  modified_base 1435: mod_base = OTHER; note = thymine
  modified_base 1439: mod_base = OTHER; note = thymine
  modified_base 1441: mod_base = OTHER; note = thymine
  modified_base 1444..1445: mod_base = OTHER; note = thymine
  modified_base 1447: mod_base = OTHER; note = thymine
  modified_base 1451: mod_base = OTHER; note = thymine
  modified_base 1454..1456: mod_base = OTHER; note = thymine
  modified_base 1458..1461: mod_base = OTHER; note = thymine
  modified_base 1467: mod_base = OTHER; note = thymine
  modified_base 1469: mod_base = OTHER; note = thymine
  modified_base 1471..1472: mod_base = OTHER; note = thymine
  modified_base 1474: mod_base = OTHER; note = thymine
  modified_base 1477: mod_base = OTHER; note = thymine
  modified_base 1481: mod_base = OTHER; note = thymine
  modified_base 1483..1484: mod_base = OTHER; note = thymine
  modified_base 1489..1492: mod_base = OTHER; note = thymine
  modified_base 1494: mod_base = OTHER; note = thymine
  modified_base 1503: mod_base = OTHER; note = thymine
  modified_base 1508..1509: mod_base = OTHER; note = thymine
  modified_base 1512: mod_base = OTHER; note = thymine
  modified_base 1515..1516: mod_base = OTHER; note = thymine
  modified_base 1519: mod_base = OTHER; note = thymine
  modified_base 1522..1524: mod_base = OTHER; note = thymine
  modified_base 1527: mod_base = OTHER; note = thymine
  modified_base 1532: mod_base = OTHER; note = thymine
  modified_base 1534: mod_base = OTHER; note = thymine
  modified_base 1537: mod_base = OTHER; note = thymine
  modified_base 1544: mod_base = OTHER; note = thymine
  modified_base 1549: mod_base = OTHER; note = thymine
  modified_base 1551..1553: mod_base = OTHER; note = thymine
  modified_base 1555: mod_base = OTHER; note = thymine
  modified_base 1560: mod_base = OTHER; note = thymine
  modified_base 1563..1564: mod_base = OTHER; note = thymine
  modified_base 1567: mod_base = OTHER; note = thymine
  modified_base 1569: mod_base = OTHER; note = thymine
  modified_base 1572: mod_base = OTHER; note = thymine
  modified_base 1574: mod_base = OTHER; note = thymine
  modified_base 1576: mod_base = OTHER; note = thymine
  modified_base 1580: mod_base = OTHER; note = thymine
  modified_base 1586: mod_base = OTHER; note = thymine
  modified_base 1588: mod_base = OTHER; note = thymine
  modified_base 1592..1593: mod_base = OTHER; note = thymine
  modified_base 1601: mod_base = OTHER; note = thymine
  modified_base 1607: mod_base = OTHER; note = thymine
  modified_base 1615..1616: mod_base = OTHER; note = thymine
  modified_base 1619..1620: mod_base = OTHER; note = thymine
  modified_base 1624: mod_base = OTHER; note = thymine
  modified_base 1629: mod_base = OTHER; note = thymine
  modified_base 1631: mod_base = OTHER; note = thymine
  modified_base 1636..1638: mod_base = OTHER; note = thymine
  modified_base 1640..1642: mod_base = OTHER; note = thymine
  modified_base 1649..1650: mod_base = OTHER; note = thymine
  modified_base 1653: mod_base = OTHER; note = thymine
  modified_base 1656: mod_base = OTHER; note = thymine
  modified_base 1658: mod_base = OTHER; note = thymine
  modified_base 1661..1662: mod_base = OTHER; note = thymine
  modified_base 1667: mod_base = OTHER; note = thymine
  modified_base 1670: mod_base = OTHER; note = thymine
  modified_base 1672..1673: mod_base = OTHER; note = thymine
  modified_base 1675..1676: mod_base = OTHER; note = thymine
  modified_base 1678: mod_base = OTHER; note = thymine
  modified_base 1685: mod_base = OTHER; note = thymine
  modified_base 1690: mod_base = OTHER; note = thymine
  modified_base 1692: mod_base = OTHER; note = thymine
  modified_base 1694: mod_base = OTHER; note = thymine
  modified_base 1696: mod_base = OTHER; note = thymine
  modified_base 1701: mod_base = OTHER; note = thymine
  modified_base 1703: mod_base = OTHER; note = thymine
  modified_base 1705: mod_base = OTHER; note = thymine
  modified_base 1707..1708: mod_base = OTHER; note = thymine
  modified_base 1712..1714: mod_base = OTHER; note = thymine
  modified_base 1718: mod_base = OTHER; note = thymine
  modified_base 1720: mod_base = OTHER; note = thymine
  modified_base 1725..1727: mod_base = OTHER; note = thymine
  modified_base 1732..1733: mod_base = OTHER; note = thymine
  modified_base 1735: mod_base = OTHER; note = thymine
  modified_base 1737: mod_base = OTHER; note = thymine
  modified_base 1740: mod_base = OTHER; note = thymine
  modified_base 1745: mod_base = OTHER; note = thymine
  modified_base 1753: mod_base = OTHER; note = thymine
  modified_base 1756: mod_base = OTHER; note = thymine
  modified_base 1758: mod_base = OTHER; note = thymine
  modified_base 1761..1763: mod_base = OTHER; note = thymine
  modified_base 1766: mod_base = OTHER; note = thymine
  modified_base 1770: mod_base = OTHER; note = thymine
  modified_base 1772: mod_base = OTHER; note = thymine
  modified_base 1781: mod_base = OTHER; note = thymine
  modified_base 1783..1784: mod_base = OTHER; note = thymine
  modified_base 1786: mod_base = OTHER; note = thymine
  modified_base 1789: mod_base = OTHER; note = thymine
  modified_base 1796: mod_base = OTHER; note = thymine
  modified_base 1798..1799: mod_base = OTHER; note = thymine
  modified_base 1801..1804: mod_base = OTHER; note = thymine
  modified_base 1810: mod_base = OTHER; note = thymine
  modified_base 1813: mod_base = OTHER; note = thymine
  modified_base 1819: mod_base = OTHER; note = thymine
  modified_base 1835..1836: mod_base = OTHER; note = thymine
  modified_base 1840: mod_base = OTHER; note = thymine
  modified_base 1844..1845: mod_base = OTHER; note = thymine
  modified_base 1857: mod_base = OTHER; note = thymine
  modified_base 1861: mod_base = OTHER; note = thymine
  modified_base 1870: mod_base = OTHER; note = thymine
  modified_base 1876: mod_base = OTHER; note = thymine
  modified_base 1886: mod_base = OTHER; note = thymine
  modified_base 1888: mod_base = OTHER; note = thymine
  modified_base 1891..1894: mod_base = OTHER; note = thymine
  modified_base 1896: mod_base = OTHER; note = thymine
  modified_base 1899: mod_base = OTHER; note = thymine
  modified_base 1904..1906: mod_base = OTHER; note = thymine
  modified_base 1912: mod_base = OTHER; note = thymine
  modified_base 1914: mod_base = OTHER; note = thymine
  modified_base 1916..1919: mod_base = OTHER; note = thymine
  modified_base 1922..1924: mod_base = OTHER; note = thymine
  modified_base 1931..1932: mod_base = OTHER; note = thymine
  modified_base 1934..1937: mod_base = OTHER; note = thymine
  modified_base 1939..1940: mod_base = OTHER; note = thymine
  modified_base 1950..1952: mod_base = OTHER; note = thymine
  modified_base 1954..1955: mod_base = OTHER; note = thymine
  modified_base 1959: mod_base = OTHER; note = thymine
  modified_base 1964..1965: mod_base = OTHER; note = thymine
  modified_base 1970: mod_base = OTHER; note = thymine
  modified_base 1972: mod_base = OTHER; note = thymine
  modified_base 1976: mod_base = OTHER; note = thymine
  modified_base 1980: mod_base = OTHER; note = thymine
  modified_base 1982: mod_base = OTHER; note = thymine
  modified_base 1991..1992: mod_base = OTHER; note = thymine
  modified_base 1996: mod_base = OTHER; note = thymine
  modified_base 1998: mod_base = OTHER; note = thymine
  modified_base 2004: mod_base = OTHER; note = thymine
  modified_base 2006: mod_base = OTHER; note = thymine
  modified_base 2020: mod_base = OTHER; note = thymine
  modified_base 2024: mod_base = OTHER; note = thymine
  modified_base 2026: mod_base = OTHER; note = thymine
  modified_base 2029: mod_base = OTHER; note = thymine
  modified_base 2038: mod_base = OTHER; note = thymine
  modified_base 2041: mod_base = OTHER; note = thymine
  modified_base 2044: mod_base = OTHER; note = thymine
  modified_base 2046: mod_base = OTHER; note = thymine
  modified_base 2049: mod_base = OTHER; note = thymine
  modified_base 2057..2058: mod_base = OTHER; note = thymine
  modified_base 2069: mod_base = OTHER; note = thymine
  modified_base 2071: mod_base = OTHER; note = thymine
  modified_base 2073..2074: mod_base = OTHER; note = thymine
  modified_base 2076..2077: mod_base = OTHER; note = thymine
  modified_base 2082..2084: mod_base = OTHER; note = thymine
  modified_base 2087: mod_base = OTHER; note = thymine
  modified_base 2092: mod_base = OTHER; note = thymine
  modified_base 2094: mod_base = OTHER; note = thymine
  modified_base 2097: mod_base = OTHER; note = thymine
  modified_base 2102: mod_base = OTHER; note = thymine
  modified_base 2108: mod_base = OTHER; note = thymine
  modified_base 2111: mod_base = OTHER; note = thymine
  modified_base 2133: mod_base = OTHER; note = thymine
  modified_base 2135..2136: mod_base = OTHER; note = thymine
  modified_base 2152: mod_base = OTHER; note = thymine
  modified_base 2160: mod_base = OTHER; note = thymine
  modified_base 2162: mod_base = OTHER; note = thymine
  modified_base 2165: mod_base = OTHER; note = thymine
  modified_base 2167: mod_base = OTHER; note = thymine
  modified_base 2175..2176: mod_base = OTHER; note = thymine
  modified_base 2180: mod_base = OTHER; note = thymine
  modified_base 2182: mod_base = OTHER; note = thymine
  modified_base 2185..2186: mod_base = OTHER; note = thymine
  modified_base 2192: mod_base = OTHER; note = thymine
  modified_base 2194..2195: mod_base = OTHER; note = thymine
  modified_base 2198: mod_base = OTHER; note = thymine
  modified_base 2201: mod_base = OTHER; note = thymine
  modified_base 2207: mod_base = OTHER; note = thymine
  modified_base 2210..2213: mod_base = OTHER; note = thymine
  modified_base 2216..2218: mod_base = OTHER; note = thymine
  modified_base 2230: mod_base = OTHER; note = thymine
  modified_base 2234: mod_base = OTHER; note = thymine
  modified_base 2237..2238: mod_base = OTHER; note = thymine
  modified_base 2243: mod_base = OTHER; note = thymine
  modified_base 2249: mod_base = OTHER; note = thymine
  modified_base 2256: mod_base = OTHER; note = thymine
  modified_base 2262: mod_base = OTHER; note = thymine
  modified_base 2267..2268: mod_base = OTHER; note = thymine
  modified_base 2271..2274: mod_base = OTHER; note = thymine
  modified_base 2276: mod_base = OTHER; note = thymine
  modified_base 2281..2282: mod_base = OTHER; note = thymine
  modified_base 2284: mod_base = OTHER; note = thymine
  modified_base 2286..2288: mod_base = OTHER; note = thymine
  modified_base 2290..2291: mod_base = OTHER; note = thymine
  modified_base 2294: mod_base = OTHER; note = thymine
  modified_base 2297..2299: mod_base = OTHER; note = thymine
  modified_base 2303..2305: mod_base = OTHER; note = thymine
  modified_base 2310: mod_base = OTHER; note = thymine
  modified_base 2312: mod_base = OTHER; note = thymine
  modified_base 2315: mod_base = OTHER; note = thymine
  modified_base 2317: mod_base = OTHER; note = thymine
  modified_base 2320: mod_base = OTHER; note = thymine
  modified_base 2323..2324: mod_base = OTHER; note = thymine
  modified_base 2326..2328: mod_base = OTHER; note = thymine
  modified_base 2330: mod_base = OTHER; note = thymine
  modified_base 2332: mod_base = OTHER; note = thymine
  modified_base 2335: mod_base = OTHER; note = thymine
  modified_base 2337: mod_base = OTHER; note = thymine
  modified_base 2339: mod_base = OTHER; note = thymine
  modified_base 2342: mod_base = OTHER; note = thymine
  modified_base 2344..2345: mod_base = OTHER; note = thymine
  modified_base 2347..2349: mod_base = OTHER; note = thymine
  modified_base 2355..2356: mod_base = OTHER; note = thymine
  modified_base 2358: mod_base = OTHER; note = thymine
  modified_base 2360: mod_base = OTHER; note = thymine
  modified_base 2362..2365: mod_base = OTHER; note = thymine
  modified_base 2367: mod_base = OTHER; note = thymine
  modified_base 2369..2371: mod_base = OTHER; note = thymine
  modified_base 2375: mod_base = OTHER; note = thymine
  modified_base 2381: mod_base = OTHER; note = thymine
  modified_base 2385..2388: mod_base = OTHER; note = thymine
  modified_base 2392..2393: mod_base = OTHER; note = thymine
  modified_base 2396: mod_base = OTHER; note = thymine
  modified_base 2400..2402: mod_base = OTHER; note = thymine
  modified_base 2406: mod_base = OTHER; note = thymine
  modified_base 2409..2410: mod_base = OTHER; note = thymine
  modified_base 2416..2417: mod_base = OTHER; note = thymine
  modified_base 2425: mod_base = OTHER; note = thymine
  modified_base 2430: mod_base = OTHER; note = thymine
  modified_base 2437: mod_base = OTHER; note = thymine
  modified_base 2440..2441: mod_base = OTHER; note = thymine
  modified_base 2448: mod_base = OTHER; note = thymine
  modified_base 2450: mod_base = OTHER; note = thymine
  modified_base 2455..2456: mod_base = OTHER; note = thymine
  modified_base 2459: mod_base = OTHER; note = thymine
  modified_base 2462: mod_base = OTHER; note = thymine
  modified_base 2471..2472: mod_base = OTHER; note = thymine
  modified_base 2477..2479: mod_base = OTHER; note = thymine
  modified_base 2482..2484: mod_base = OTHER; note = thymine
  modified_base 2496: mod_base = OTHER; note = thymine
  modified_base 2499: mod_base = OTHER; note = thymine
  modified_base 2502: mod_base = OTHER; note = thymine
  modified_base 2506..2508: mod_base = OTHER; note = thymine
  modified_base 2511..2512: mod_base = OTHER; note = thymine
  modified_base 2515: mod_base = OTHER; note = thymine
  modified_base 2517: mod_base = OTHER; note = thymine
  modified_base 2519..2520: mod_base = OTHER; note = thymine
  modified_base 2522..2523: mod_base = OTHER; note = thymine
  modified_base 2525: mod_base = OTHER; note = thymine
  modified_base 2531: mod_base = OTHER; note = thymine
  modified_base 2534: mod_base = OTHER; note = thymine
  modified_base 2536: mod_base = OTHER; note = thymine
  modified_base 2540..2542: mod_base = OTHER; note = thymine
  modified_base 2548: mod_base = OTHER; note = thymine
  modified_base 2550: mod_base = OTHER; note = thymine
  modified_base 2552: mod_base = OTHER; note = thymine
  modified_base 2554..2555: mod_base = OTHER; note = thymine
  modified_base 2565: mod_base = OTHER; note = thymine
  modified_base 2567..2571: mod_base = OTHER; note = thymine
  modified_base 2576..2582: mod_base = OTHER; note = thymine
  modified_base 2585: mod_base = OTHER; note = thymine
  modified_base 2589: mod_base = OTHER; note = thymine
  modified_base 2592: mod_base = OTHER; note = thymine
  modified_base 2599..2600: mod_base = OTHER; note = thymine
  modified_base 2602: mod_base = OTHER; note = thymine
  modified_base 2604: mod_base = OTHER; note = thymine
  modified_base 2606: mod_base = OTHER; note = thymine
  modified_base 2608: mod_base = OTHER; note = thymine
  modified_base 2611: mod_base = OTHER; note = thymine
  modified_base 2613: mod_base = OTHER; note = thymine
  modified_base 2615: mod_base = OTHER; note = thymine
  modified_base 2618..2620: mod_base = OTHER; note = thymine
  modified_base 2623: mod_base = OTHER; note = thymine
  modified_base 2625..2629: mod_base = OTHER; note = thymine
  modified_base 2631..2633: mod_base = OTHER; note = thymine
  modified_base 2635..2638: mod_base = OTHER; note = thymine
  modified_base 2641: mod_base = OTHER; note = thymine
  modified_base 2643..2645: mod_base = OTHER; note = thymine
  modified_base 2647..2648: mod_base = OTHER; note = thymine
  modified_base 2650: mod_base = OTHER; note = thymine
  modified_base 2652: mod_base = OTHER; note = thymine
  modified_base 2659: mod_base = OTHER; note = thymine
  modified_base 2664: mod_base = OTHER; note = thymine
  modified_base 2668..2670: mod_base = OTHER; note = thymine
  modified_base 2675..2676: mod_base = OTHER; note = thymine
  modified_base 2685: mod_base = OTHER; note = thymine
  modified_base 2691: mod_base = OTHER; note = thymine
  modified_base 2695: mod_base = OTHER; note = thymine
  modified_base 2699..2700: mod_base = OTHER; note = thymine
  modified_base 2702..2704: mod_base = OTHER; note = thymine
  modified_base 2706..2708: mod_base = OTHER; note = thymine
  modified_base 2710: mod_base = OTHER; note = thymine
  modified_base 2714..2715: mod_base = OTHER; note = thymine
  modified_base 2717: mod_base = OTHER; note = thymine
  modified_base 2719..2721: mod_base = OTHER; note = thymine
  modified_base 2726: mod_base = OTHER; note = thymine
  modified_base 2730..2733: mod_base = OTHER; note = thymine
  modified_base 2736..2737: mod_base = OTHER; note = thymine
  modified_base 2739: mod_base = OTHER; note = thymine
  modified_base 2741..2743: mod_base = OTHER; note = thymine
  modified_base 2746: mod_base = OTHER; note = thymine
  modified_base 2748: mod_base = OTHER; note = thymine
  modified_base 2751: mod_base = OTHER; note = thymine
  modified_base 2756: mod_base = OTHER; note = thymine
  modified_base 2758: mod_base = OTHER; note = thymine
  modified_base 2760: mod_base = OTHER; note = thymine
  modified_base 2762..2763: mod_base = OTHER; note = thymine
  modified_base 2767: mod_base = OTHER; note = thymine
  modified_base 2769: mod_base = OTHER; note = thymine
  modified_base 2771: mod_base = OTHER; note = thymine
  modified_base 2774: mod_base = OTHER; note = thymine
  modified_base 2778: mod_base = OTHER; note = thymine
  modified_base 2780: mod_base = OTHER; note = thymine
  modified_base 2784..2786: mod_base = OTHER; note = thymine
  modified_base 2799..2801: mod_base = OTHER; note = thymine
  modified_base 2803..2804: mod_base = OTHER; note = thymine
  modified_base 2808: mod_base = OTHER; note = thymine
  modified_base 2810..2812: mod_base = OTHER; note = thymine
  modified_base 2815: mod_base = OTHER; note = thymine
  modified_base 2817: mod_base = OTHER; note = thymine
  modified_base 2827..2829: mod_base = OTHER; note = thymine
  modified_base 2833..2835: mod_base = OTHER; note = thymine
  modified_base 2837..2839: mod_base = OTHER; note = thymine
  modified_base 2841: mod_base = OTHER; note = thymine
  modified_base 2843..2845: mod_base = OTHER; note = thymine
  modified_base 2848: mod_base = OTHER; note = thymine
  modified_base 2863: mod_base = OTHER; note = thymine
  modified_base 2868: mod_base = OTHER; note = thymine
  modified_base 2870: mod_base = OTHER; note = thymine
  modified_base 2877: mod_base = OTHER; note = thymine
  modified_base 2882: mod_base = OTHER; note = thymine
  modified_base 2886: mod_base = OTHER; note = thymine
  modified_base 2890: mod_base = OTHER; note = thymine
  modified_base 2892: mod_base = OTHER; note = thymine
  modified_base 2895: mod_base = OTHER; note = thymine
  modified_base 2898: mod_base = OTHER; note = thymine
  modified_base 2908: mod_base = OTHER; note = thymine
  modified_base 2910..2911: mod_base = OTHER; note = thymine
  modified_base 2913..2914: mod_base = OTHER; note = thymine
  modified_base 2916..2917: mod_base = OTHER; note = thymine
  modified_base 2921: mod_base = OTHER; note = thymine
  modified_base 2923: mod_base = OTHER; note = thymine
  modified_base 2925: mod_base = OTHER; note = thymine
  modified_base 2927: mod_base = OTHER; note = thymine
  modified_base 2935: mod_base = OTHER; note = thymine
  modified_base 2938: mod_base = OTHER; note = thymine
  modified_base 2940: mod_base = OTHER; note = thymine
  modified_base 2942: mod_base = OTHER; note = thymine
  modified_base 2948..2951: mod_base = OTHER; note = thymine
  modified_base 2953..2956: mod_base = OTHER; note = thymine
  modified_base 2958: mod_base = OTHER; note = thymine
  modified_base 2961..2963: mod_base = OTHER; note = thymine
  modified_base 2965: mod_base = OTHER; note = thymine
  modified_base 2967: mod_base = OTHER; note = thymine
  modified_base 2972: mod_base = OTHER; note = thymine
  modified_base 2974: mod_base = OTHER; note = thymine
  modified_base 2979..2980: mod_base = OTHER; note = thymine
  modified_base 2984..2986: mod_base = OTHER; note = thymine
  modified_base 2989: mod_base = OTHER; note = thymine
  modified_base 2992: mod_base = OTHER; note = thymine
  modified_base 2994: mod_base = OTHER; note = thymine
  modified_base 2997..2998: mod_base = OTHER; note = thymine
  modified_base 3005: mod_base = OTHER; note = thymine
  modified_base 3010..3013: mod_base = OTHER; note = thymine
  modified_base 3015..3017: mod_base = OTHER; note = thymine
  modified_base 3019: mod_base = OTHER; note = thymine
  modified_base 3025..3026: mod_base = OTHER; note = thymine
  modified_base 3034: mod_base = OTHER; note = thymine
  modified_base 3036: mod_base = OTHER; note = thymine
  modified_base 3040..3041: mod_base = OTHER; note = thymine
  modified_base 3045: mod_base = OTHER; note = thymine
  modified_base 3048: mod_base = OTHER; note = thymine
  modified_base 3052: mod_base = OTHER; note = thymine
  modified_base 3057: mod_base = OTHER; note = thymine
  modified_base 3059: mod_base = OTHER; note = thymine
  modified_base 3072: mod_base = OTHER; note = thymine
  modified_base 3075..3076: mod_base = OTHER; note = thymine
  modified_base 3079..3080: mod_base = OTHER; note = thymine
  modified_base 3082: mod_base = OTHER; note = thymine
  modified_base 3085..3086: mod_base = OTHER; note = thymine
  modified_base 3093..3094: mod_base = OTHER; note = thymine
  modified_base 3098: mod_base = OTHER; note = thymine
  modified_base 3108: mod_base = OTHER; note = thymine
  modified_base 3110: mod_base = OTHER; note = thymine
  modified_base 3113: mod_base = OTHER; note = thymine
  modified_base 3117: mod_base = OTHER; note = thymine
  modified_base 3127: mod_base = OTHER; note = thymine
  modified_base 3130: mod_base = OTHER; note = thymine
  modified_base 3138..3139: mod_base = OTHER; note = thymine
  modified_base 3142: mod_base = OTHER; note = thymine
  modified_base 3148..3150: mod_base = OTHER; note = thymine
  modified_base 3156..3157: mod_base = OTHER; note = thymine
  modified_base 3162: mod_base = OTHER; note = thymine
  modified_base 3167: mod_base = OTHER; note = thymine
  modified_base 3174: mod_base = OTHER; note = thymine
  modified_base 3182..3184: mod_base = OTHER; note = thymine
  modified_base 3187..3189: mod_base = OTHER; note = thymine
  modified_base 3193: mod_base = OTHER; note = thymine
  modified_base 3195..3196: mod_base = OTHER; note = thymine
  modified_base 3202: mod_base = OTHER; note = thymine
  modified_base 3204..3205: mod_base = OTHER; note = thymine
  modified_base 3207: mod_base = OTHER; note = thymine
  modified_base 3210: mod_base = OTHER; note = thymine
  modified_base 3212: mod_base = OTHER; note = thymine
  modified_base 3216: mod_base = OTHER; note = thymine
  modified_base 3226: mod_base = OTHER; note = thymine
  modified_base 3230..3231: mod_base = OTHER; note = thymine
  modified_base 3235..3237: mod_base = OTHER; note = thymine
  modified_base 3244: mod_base = OTHER; note = thymine
  modified_base 3246: mod_base = OTHER; note = thymine
  modified_base 3253: mod_base = OTHER; note = thymine
  modified_base 3264: mod_base = OTHER; note = thymine
  modified_base 3266: mod_base = OTHER; note = thymine
  modified_base 3268: mod_base = OTHER; note = thymine
  modified_base 3279: mod_base = OTHER; note = thymine
  modified_base 3282..3283: mod_base = OTHER; note = thymine
  modified_base 3285: mod_base = OTHER; note = thymine
  modified_base 3287..3288: mod_base = OTHER; note = thymine
  modified_base 3290: mod_base = OTHER; note = thymine
  modified_base 3292: mod_base = OTHER; note = thymine
  modified_base 3294..3296: mod_base = OTHER; note = thymine
  modified_base 3298: mod_base = OTHER; note = thymine
  modified_base 3302: mod_base = OTHER; note = thymine
  modified_base 3304: mod_base = OTHER; note = thymine
  modified_base 3308..3310: mod_base = OTHER; note = thymine
  modified_base 3312: mod_base = OTHER; note = thymine
  modified_base 3317: mod_base = OTHER; note = thymine
  modified_base 3320..3321: mod_base = OTHER; note = thymine
  modified_base 3324: mod_base = OTHER; note = thymine
  modified_base 3326: mod_base = OTHER; note = thymine
  modified_base 3332: mod_base = OTHER; note = thymine
  modified_base 3334..3335: mod_base = OTHER; note = thymine
  modified_base 3337..3339: mod_base = OTHER; note = thymine
  modified_base 3341: mod_base = OTHER; note = thymine
  modified_base 3343: mod_base = OTHER; note = thymine
  modified_base 3347..3348: mod_base = OTHER; note = thymine
  modified_base 3360..3361: mod_base = OTHER; note = thymine
  modified_base 3363: mod_base = OTHER; note = thymine
  modified_base 3367: mod_base = OTHER; note = thymine
  modified_base 3380: mod_base = OTHER; note = thymine
  modified_base 3383: mod_base = OTHER; note = thymine
  modified_base 3385: mod_base = OTHER; note = thymine
  modified_base 3388: mod_base = OTHER; note = thymine
  modified_base 3392: mod_base = OTHER; note = thymine
  modified_base 3394: mod_base = OTHER; note = thymine
  modified_base 3396..3397: mod_base = OTHER; note = thymine
  modified_base 3400: mod_base = OTHER; note = thymine
  modified_base 3404: mod_base = OTHER; note = thymine
  modified_base 3407: mod_base = OTHER; note = thymine
  modified_base 3411: mod_base = OTHER; note = thymine
  modified_base 3414: mod_base = OTHER; note = thymine
  modified_base 3417..3418: mod_base = OTHER; note = thymine
  modified_base 3420: mod_base = OTHER; note = thymine
  modified_base 3423: mod_base = OTHER; note = thymine
  modified_base 3425..3426: mod_base = OTHER; note = thymine
  modified_base 3430..3432: mod_base = OTHER; note = thymine
  modified_base 3434: mod_base = OTHER; note = thymine
  modified_base 3442..3444: mod_base = OTHER; note = thymine
  modified_base 3446: mod_base = OTHER; note = thymine
  modified_base 3450..3453: mod_base = OTHER; note = thymine
  modified_base 3455: mod_base = OTHER; note = thymine
  modified_base 3457: mod_base = OTHER; note = thymine
  modified_base 3460: mod_base = OTHER; note = thymine
  modified_base 3462..3464: mod_base = OTHER; note = thymine
  modified_base 3467: mod_base = OTHER; note = thymine
  modified_base 3470: mod_base = OTHER; note = thymine
  modified_base 3474: mod_base = OTHER; note = thymine
  modified_base 3479: mod_base = OTHER; note = thymine
  modified_base 3489: mod_base = OTHER; note = thymine
  modified_base 3492: mod_base = OTHER; note = thymine
  modified_base 3496: mod_base = OTHER; note = thymine
  modified_base 3499..3500: mod_base = OTHER; note = thymine
  modified_base 3502: mod_base = OTHER; note = thymine
  modified_base 3506..3508: mod_base = OTHER; note = thymine
  modified_base 3511..3512: mod_base = OTHER; note = thymine
  modified_base 3514: mod_base = OTHER; note = thymine
  modified_base 3518..3522: mod_base = OTHER; note = thymine
  modified_base 3524: mod_base = OTHER; note = thymine
  modified_base 3528: mod_base = OTHER; note = thymine
  modified_base 3532..3533: mod_base = OTHER; note = thymine
  modified_base 3536..3538: mod_base = OTHER; note = thymine
  modified_base 3541: mod_base = OTHER; note = thymine
  modified_base 3546: mod_base = OTHER; note = thymine
  modified_base 3548..3549: mod_base = OTHER; note = thymine
  modified_base 3551..3552: mod_base = OTHER; note = thymine
  modified_base 3554..3556: mod_base = OTHER; note = thymine
  modified_base 3558..3561: mod_base = OTHER; note = thymine
  modified_base 3563..3564: mod_base = OTHER; note = thymine
  modified_base 3567..3568: mod_base = OTHER; note = thymine
  modified_base 3571: mod_base = OTHER; note = thymine
  modified_base 3581: mod_base = OTHER; note = thymine
  modified_base 3583: mod_base = OTHER; note = thymine
  modified_base 3587..3590: mod_base = OTHER; note = thymine
  modified_base 3592..3593: mod_base = OTHER; note = thymine
  modified_base 3595..3597: mod_base = OTHER; note = thymine
  modified_base 3599..3602: mod_base = OTHER; note = thymine
  modified_base 3604: mod_base = OTHER; note = thymine
  modified_base 3606..3608: mod_base = OTHER; note = thymine
  modified_base 3611: mod_base = OTHER; note = thymine
  modified_base 3616: mod_base = OTHER; note = thymine
  modified_base 3618..3619: mod_base = OTHER; note = thymine
  modified_base 3623..3625: mod_base = OTHER; note = thymine
  modified_base 3630: mod_base = OTHER; note = thymine
  misc_feature 1..3634: note = Human CD274 mRNA
  source 1..3634: mol_type = mRNA
agttctgcgcagcttcccgaggctccgcaccagccgcgcttctgtccgcctgcagggcattccagaaagatgaggatatttgctgtctttatattcatgacctactggcatttgctgaacgcatttactgtcacggttcccaaggacctatatgtggtagagtatggtagcaatatgacaattgaatgcaaattcccagtagaaaaacaattagacctggctgcactaattgtctattgggaaatggaggataagaacattattcaatttgtgcatggagaggaagacctgaaggttcagcatagtagctacagacagagggcccggctgttgaaggaccagctctccctgggaaatgctgcacttcagatcacagatgtgaaattgcaggatgcaggggtgtaccgctgcatgatcagctatggtggtgccgactacaagcgaattactgtgaaagtcaatgccccatacaacaaaatcaaccaaagaattttggttgtggatccagtcacctctgaacatgaactgacatgtcaggctgagggctaccccaaggccgaagtcatctggacaagcagtgaccatcaagtcctgagtggtaagaccaccaccaccaattccaagagagaggagaagcttttcaatgtgaccagcacactgagaatcaacacaacaactaatgagattttctactgcacttttaggagattagatcctgaggaaaaccatacagctgaattggtcatcccagaactacctctggcacatcctccaaatgaaaggactcacttggtaattctgggagccatcttattatgccttggtgtagcactgacattcatcttccgtttaagaaaagggagaatgatggatgtgaaaaaatgtggcatccaagatacaaactcaaagaagcaaagtgatacacatttggaggagacgtaatccagcattggaacttctgatcttcaagcagggattctcaacctgtggtttaggggttcatcggggctgagcgtgacaagaggaaggaatgggcccgtgggatgcaggcaatgtgggacttaaaaggcccaagcactgaaaatggaacctggcgaaagcagaggaggagaatgaagaaagatggagtcaaacagggagcctggagggagaccttgatactttcaaatgcctgaggggctcatcgacgcctgtgacagggagaaaggatacttctgaacaaggagcctccaagcaaatcatccattgctcatcctaggaagacgggttgagaatccctaatttgagggtcagttcctgcagaagtgccctttgcctccactcaatgcctcaatttgttttctgcatgactgagagtctcagtgttggaacgggacagtatttatgtatgagtttttcctatttattttgagtctgtgaggtcttcttgtcatgtgagtgtggttgtgaatgatttcttttgaagatatattgtagtagatgttacaattttgtcgccaaactaaacttgctgcttaatgatttgctcacatctagtaaaacatggagtatttgtaaggtgcttggtctcctctataactacaagtatacattggaagcataaagatcaaaccgttggttgcataggatgtcacctttatttaacccattaatactctggttgacctaatcttattctcagacctcaagtgtctgtgcagtatctgttccatttaaatatcagctttacaattatgtggtagcctacacacataatctcatttcatcgctgtaaccaccctgttgtgataaccactattattttacccatcgtacagctgaggaagcaaacagattaagtaacttgcccaaaccagtaaatagcagacctcagactgccacccactgtccttttataatacaatttacagctatattttactttaagcaattcttttattcaaaaaccatttattaagtgcccttgcaatatcaatcgctgtgccaggcattgaatctacagatgtgagcaagacaaagtacctgtcctcaaggagctcatagtataatgaggagattaacaagaaaatgtattattacaatttagtccagtgtcatagcataaggatgatgcgaggggaaaacccgagcagtgttgccaagaggaggaaataggccaatgtggtctgggacggttggatatacttaaacatcttaataatcagagtaattttcatttacaaagagaggtcggtacttaaaataaccctgaaaaataacactggaattccttttctagcattatatttattcctgatttgcctttgccatataatctaatgcttgtttatatagtgtctggtattgtttaacagttctgtcttttctatttaaatgccactaaattttaaattcatacctttccatgattcaaaattcaaaagatcccatgggagatggttggaaaatctccacttcatcctccaagccattcaagtttcctttccagaagcaactgctactgcctttcattcatatgttcttctaaagatagtctacatttggaaatgtatgttaaaagcacgtatttttaaaatttttttcctaaatagtaacacattgtatgtctgctgtgtactttgctatttttatttattttagtgtttcttatatagcagatggaatgaatttgaagttcccagggctgaggatccatgccttctttgtttctaagttatctttcccatagcttttcattatctttcatatgatccagtatatgttaaatatgtcctacatatacatttagacaaccaccatttgttaagtatttgctctaggacagagtttggatttgtttatgtttgctcaaaaggagacccatgggctctccagggtgcactgagtcaatctagtcctaaaaagcaatcttattattaactctgtatgacagaatcatgtctggaacttttgttttctgctttctgtcaagtataaacttcactttgatgctgtacttgcaaaatcacattttctttctggaaattccggcagtgtaccttgactgctagctaccctgtgccagaaaagcctcattcgttgtgcttgaacccttgaatgccaccagctgtcatcactacacagccctcctaagaggcttcctggaggtttcgagattcagatgccctgggagatcccagagtttcctttccctcttggccatattctggtgtcaatgacaaggagtaccttggctttgccacatgtcaaggctgaagaaacagtgtctccaacagagctccttgtgttatctgtttgtacatgtgcatttgtacagtaattggtgtgacagtgttctttgtgtgaattacaggcaagaattgtggctgagcaaggcacatagtctactcagtctattcctaagtcctaactcctccttgtggtgttggatttgtaaggcactttatcccttttgtctcatgtttcatcgtaaatggcataggcagagatgatacctaattctgcatttgattgtcactttttgtacctgcattaatttaataaaatattcttatttattttgttacttggtacaccagcatgtccattttcttgtttattttgtgtttaataaaatgttcagtttaacatccca

SEQ ID NO: 1038 - RNA, 4170 nt, Macaca fascicularis
  modified_base 21: mod_base = OTHER; note = thymine
  modified_base 24..26: mod_base = OTHER; note = thymine
  modified_base 28: mod_base = OTHER; note = thymine
  modified_base 33: mod_base = OTHER; note = thymine
  modified_base 48: mod_base = OTHER; note = thymine
  modified_base 50: mod_base = OTHER; note = thymine
  modified_base 54: mod_base = OTHER; note = thymine
  modified_base 56: mod_base = OTHER; note = thymine
  modified_base 59: mod_base = OTHER; note = thymine
  modified_base 61..62: mod_base = OTHER; note = thymine
  modified_base 66..68: mod_base = OTHER; note = thymine
  modified_base 70: mod_base = OTHER; note = thymine
  modified_base 72: mod_base = OTHER; note = thymine
  modified_base 74: mod_base = OTHER; note = thymine
  modified_base 76: mod_base = OTHER; note = thymine
  modified_base 79: mod_base = OTHER; note = thymine
  modified_base 84..85: mod_base = OTHER; note = thymine
  modified_base 87: mod_base = OTHER; note = thymine
  modified_base 89: mod_base = OTHER; note = thymine
  modified_base 94..95: mod_base = OTHER; note = thymine
  modified_base 99: mod_base = OTHER; note = thymine
  modified_base 105: mod_base = OTHER; note = thymine
  modified_base 107..108: mod_base = OTHER; note = thymine
  modified_base 112: mod_base = OTHER; note = thymine
  modified_base 117..118: mod_base = OTHER; note = thymine
  modified_base 127..130: mod_base = OTHER; note = thymine
  modified_base 132: mod_base = OTHER; note = thymine
  modified_base 149..151: mod_base = OTHER; note = thymine
  modified_base 153: mod_base = OTHER; note = thymine
  modified_base 156: mod_base = OTHER; note = thymine
  modified_base 162..163: mod_base = OTHER; note = thymine
  modified_base 170: mod_base = OTHER; note = thymine
  modified_base 175..176: mod_base = OTHER; note = thymine
  modified_base 181: mod_base = OTHER; note = thymine
  modified_base 183: mod_base = OTHER; note = thymine
  modified_base 190: mod_base = OTHER; note = thymine
  modified_base 192: mod_base = OTHER; note = thymine
  modified_base 198: mod_base = OTHER; note = thymine
  modified_base 203: mod_base = OTHER; note = thymine
  modified_base 209: mod_base = OTHER; note = thymine
  modified_base 213..214: mod_base = OTHER; note = thymine
  modified_base 219: mod_base = OTHER; note = thymine
  modified_base 221..222: mod_base = OTHER; note = thymine
  modified_base 226..227: mod_base = OTHER; note = thymine
  modified_base 229..230: mod_base = OTHER; note = thymine
  modified_base 232: mod_base = OTHER; note = thymine
  modified_base 236..238: mod_base = OTHER; note = thymine
  modified_base 240: mod_base = OTHER; note = thymine
  modified_base 242..244: mod_base = OTHER; note = thymine
  modified_base 246: mod_base = OTHER; note = thymine
  modified_base 248..249: mod_base = OTHER; note = thymine
  modified_base 252: mod_base = OTHER; note = thymine
  modified_base 257: mod_base = OTHER; note = thymine
  modified_base 264: mod_base = OTHER; note = thymine
  modified_base 266: mod_base = OTHER; note = thymine
  modified_base 270..272: mod_base = OTHER; note = thymine
  modified_base 274..277: mod_base = OTHER; note = thymine
  modified_base 280: mod_base = OTHER; note = thymine
  modified_base 282..283: mod_base = OTHER; note = thymine
  modified_base 290: mod_base = OTHER; note = thymine
  modified_base 292..294: mod_base = OTHER; note = thymine
  modified_base 299: mod_base = OTHER; note = thymine
  modified_base 307: mod_base = OTHER; note = thymine
  modified_base 310..312: mod_base = OTHER; note = thymine
  modified_base 323: mod_base = OTHER; note = thymine
  modified_base 328: mod_base = OTHER; note = thymine
  modified_base 335..337: mod_base = OTHER; note = thymine
  modified_base 341..343: mod_base = OTHER; note = thymine
  modified_base 345: mod_base = OTHER; note = thymine
  modified_base 347..349: mod_base = OTHER; note = thymine
  modified_base 352..354: mod_base = OTHER; note = thymine
  modified_base 356: mod_base = OTHER; note = thymine
  modified_base 358: mod_base = OTHER; note = thymine
  modified_base 362: mod_base = OTHER; note = thymine
  modified_base 366..368: mod_base = OTHER; note = thymine
  modified_base 370..371: mod_base = OTHER; note = thymine
  modified_base 374: mod_base = OTHER; note = thymine
  modified_base 391: mod_base = OTHER; note = thymine
  modified_base 395: mod_base = OTHER; note = thymine
  modified_base 404: mod_base = OTHER; note = thymine
  modified_base 411..412: mod_base = OTHER; note = thymine
  modified_base 419..420: mod_base = OTHER; note = thymine
  modified_base 431: mod_base = OTHER; note = thymine
  modified_base 440: mod_base = OTHER; note = thymine
  modified_base 445: mod_base = OTHER; note = thymine
  modified_base 457: mod_base = OTHER; note = thymine
  modified_base 461..463: mod_base = OTHER; note = thymine
  modified_base 466: mod_base = OTHER; note = thymine
  modified_base 470..471: mod_base = OTHER; note = thymine
  modified_base 481: mod_base = OTHER; note = thymine
  modified_base 497: mod_base = OTHER; note = thymine
  modified_base 515..516: mod_base = OTHER; note = thymine
  modified_base 524: mod_base = OTHER; note = thymine
  modified_base 533: mod_base = OTHER; note = thymine
  modified_base 547: mod_base = OTHER; note = thymine
  modified_base 550: mod_base = OTHER; note = thymine
  modified_base 561: mod_base = OTHER; note = thymine
  modified_base 564: mod_base = OTHER; note = thymine
  modified_base 569: mod_base = OTHER; note = thymine
  modified_base 572..573: mod_base = OTHER; note = thymine
  modified_base 582: mod_base = OTHER; note = thymine
  modified_base 598..599: mod_base = OTHER; note = thymine
  modified_base 601: mod_base = OTHER; note = thymine
  modified_base 603: mod_base = OTHER; note = thymine
  modified_base 605: mod_base = OTHER; note = thymine
  modified_base 609: mod_base = OTHER; note = thymine
  modified_base 618..619: mod_base = OTHER; note = thymine
  modified_base 629: mod_base = OTHER; note = thymine
  modified_base 635: mod_base = OTHER; note = thymine
  modified_base 637..639: mod_base = OTHER; note = thymine
  modified_base 642: mod_base = OTHER; note = thymine
  modified_base 644: mod_base = OTHER; note = thymine
  modified_base 646..648: mod_base = OTHER; note = thymine
  modified_base 650: mod_base = OTHER; note = thymine
  modified_base 652..653: mod_base = OTHER; note = thymine
  modified_base 659: mod_base = OTHER; note = thymine
  modified_base 661: mod_base = OTHER; note = thymine
  modified_base 664: mod_base = OTHER; note = thymine
  modified_base 669..671: mod_base = OTHER; note = thymine
  modified_base 674: mod_base = OTHER; note = thymine
  modified_base 678: mod_base = OTHER; note = thymine
  modified_base 682..684: mod_base = OTHER; note = thymine
  modified_base 687: mod_base = OTHER; note = thymine
  modified_base 689: mod_base = OTHER; note = thymine
  modified_base 695..696: mod_base = OTHER; note = thymine
  modified_base 707: mod_base = OTHER; note = thymine
  modified_base 709: mod_base = OTHER; note = thymine
  modified_base 711: mod_base = OTHER; note = thymine
  modified_base 713: mod_base = OTHER; note = thymine
  modified_base 716: mod_base = OTHER; note = thymine
  modified_base 721: mod_base = OTHER; note = thymine
  modified_base 723: mod_base = OTHER; note = thymine
  modified_base 732: mod_base = OTHER; note = thymine
  modified_base 734: mod_base = OTHER; note = thymine
  modified_base 740..741: mod_base = OTHER; note = thymine
  modified_base 745: mod_base = OTHER; note = thymine
  modified_base 751..752: mod_base = OTHER; note = thymine
  modified_base 758: mod_base = OTHER; note = thymine
  modified_base 769..770: mod_base = OTHER; note = thymine
  modified_base 776: mod_base = OTHER; note = thymine
  modified_base 780..781: mod_base = OTHER; note = thymine
  modified_base 785: mod_base = OTHER; note = thymine
  modified_base 788..789: mod_base = OTHER; note = thymine
  modified_base 791: mod_base = OTHER; note = thymine
  modified_base 793: mod_base = OTHER; note = thymine
  modified_base 795..796: mod_base = OTHER; note = thymine
  modified_base 803: mod_base = OTHER; note = thymine
  modified_base 810: mod_base = OTHER; note = thymine
  modified_base 818..819: mod_base = OTHER; note = thymine
  modified_base 821..822: mod_base = OTHER; note = thymine
  modified_base 826..828: mod_base = OTHER; note = thymine
  modified_base 830: mod_base = OTHER; note = thymine
  modified_base 834: mod_base = OTHER; note = thymine
  modified_base 848: mod_base = OTHER; note = thymine
  modified_base 854..855: mod_base = OTHER; note = thymine
  modified_base 861: mod_base = OTHER; note = thymine
  modified_base 864: mod_base = OTHER; note = thymine
  modified_base 868: mod_base = OTHER; note = thymine
  modified_base 887: mod_base = OTHER; note = thymine
  modified_base 889..890: mod_base = OTHER; note = thymine
  modified_base 902: mod_base = OTHER; note = thymine
  modified_base 904: mod_base = OTHER; note = thymine
  modified_base 908: mod_base = OTHER; note = thymine
  modified_base 915: mod_base = OTHER; note = thymine
  modified_base 918: mod_base = OTHER; note = thymine
  modified_base 923..924: mod_base = OTHER; note = thymine
  modified_base 929: mod_base = OTHER; note = thymine
  modified_base 936: mod_base = OTHER; note = thymine
  modified_base 938: mod_base = OTHER; note = thymine
  modified_base 943..944: mod_base = OTHER; note = thymine
  modified_base 951: mod_base = OTHER; note = thymine
  modified_base 959..961: mod_base = OTHER; note = thymine
  modified_base 967: mod_base = OTHER; note = thymine
  modified_base 971: mod_base = OTHER; note = thymine
  modified_base 974: mod_base = OTHER; note = thymine
  modified_base 979: mod_base = OTHER; note = thymine
  modified_base 981: mod_base = OTHER; note = thymine
  modified_base 984: mod_base = OTHER; note = thymine
  modified_base 987: mod_base = OTHER; note = thymine
  modified_base 994: mod_base = OTHER; note = thymine
  modified_base 1004..1005: mod_base = OTHER; note = thymine
  modified_base 1010: mod_base = OTHER; note = thymine
  modified_base 1016: mod_base = OTHER; note = thymine
  modified_base 1020: mod_base = OTHER; note = thymine
  modified_base 1023: mod_base = OTHER; note = thymine
  modified_base 1027: mod_base = OTHER; note = thymine
  modified_base 1037: mod_base = OTHER; note = thymine
  modified_base 1049..1052: mod_base = OTHER; note = thymine
  modified_base 1055..1056: mod_base = OTHER; note = thymine
  modified_base 1058: mod_base = OTHER; note = thymine
  modified_base 1062: mod_base = OTHER; note = thymine
  modified_base 1067: mod_base = OTHER; note = thymine
  modified_base 1072: mod_base = OTHER; note = thymine
  modified_base 1074: mod_base = OTHER; note = thymine
  modified_base 1080: mod_base = OTHER; note = thymine
  modified_base 1085: mod_base = OTHER; note = thymine
  modified_base 1090: mod_base = OTHER; note = thymine
  modified_base 1092: mod_base = OTHER; note = thymine
  modified_base 1098: mod_base = OTHER; note = thymine
  modified_base 1105: mod_base = OTHER; note = thymine
  modified_base 1121: mod_base = OTHER; note = thymine
  modified_base 1124..1126: mod_base = OTHER; note = thymine
  modified_base 1137: mod_base = OTHER; note = thymine
  modified_base 1143: mod_base = OTHER; note = thymine
  modified_base 1148: mod_base = OTHER; note = thymine
  modified_base 1151: mod_base = OTHER; note = thymine
  modified_base 1155: mod_base = OTHER; note = thymine
  modified_base 1158: mod_base = OTHER; note = thymine
  modified_base 1176..1177: mod_base = OTHER; note = thymine
  modified_base 1196..1199: mod_base = OTHER; note = thymine
  modified_base 1203: mod_base = OTHER; note = thymine
  modified_base 1205: mod_base = OTHER; note = thymine
  modified_base 1217: mod_base = OTHER; note = thymine
  modified_base 1223: mod_base = OTHER; note = thymine
  modified_base 1236: mod_base = OTHER; note = thymine
  modified_base 1239: mod_base = OTHER; note = thymine
  modified_base 1244..1247: mod_base = OTHER; note = thymine
  modified_base 1249: mod_base = OTHER; note = thymine
  modified_base 1252: mod_base = OTHER; note = thymine
  modified_base 1256..1260: mod_base = OTHER; note = thymine
  modified_base 1267..1268: mod_base = OTHER; note = thymine
  modified_base 1272: mod_base = OTHER; note = thymine
  modified_base 1275: mod_base = OTHER; note = thymine
  modified_base 1287: mod_base = OTHER; note = thymine
  modified_base 1293: mod_base = OTHER; note = thymine
  modified_base 1297..1298: mod_base = OTHER; note = thymine
  modified_base 1301: mod_base = OTHER; note = thymine
  modified_base 1304: mod_base = OTHER; note = thymine
  modified_base 1313: mod_base = OTHER; note = thymine
  modified_base 1317: mod_base = OTHER; note = thymine
  modified_base 1319: mod_base = OTHER; note = thymine
  modified_base 1325..1326: mod_base = OTHER; note = thymine
  modified_base 1329: mod_base = OTHER; note = thymine
  modified_base 1335: mod_base = OTHER; note = thymine
  modified_base 1344: mod_base = OTHER; note = thymine
  modified_base 1348..1349: mod_base = OTHER; note = thymine
  modified_base 1352: mod_base = OTHER; note = thymine
  modified_base 1355..1356: mod_base = OTHER; note = thymine
  modified_base 1358: mod_base = OTHER; note = thymine
  modified_base 1367: mod_base = OTHER; note = thymine
  modified_base 1369..1373: mod_base = OTHER; note = thymine
  modified_base 1376: mod_base = OTHER; note = thymine
  modified_base 1379..1380: mod_base = OTHER; note = thymine
  modified_base 1383: mod_base = OTHER; note = thymine
  modified_base 1385: mod_base = OTHER; note = thymine
  modified_base 1391: mod_base = OTHER; note = thymine
  modified_base 1396..1397: mod_base = OTHER; note = thymine
  modified_base 1400: mod_base = OTHER; note = thymine
  modified_base 1402..1403: mod_base = OTHER; note = thymine
  modified_base 1405: mod_base = OTHER; note = thymine
  modified_base 1407..1409: mod_base = OTHER; note = thymine
  modified_base 1424: mod_base = OTHER; note = thymine
  modified_base 1427: mod_base = OTHER; note = thymine
  modified_base 1431: mod_base = OTHER; note = thymine
  modified_base 1433: mod_base = OTHER; note = thymine
  modified_base 1441: mod_base = OTHER; note = thymine
  modified_base 1443: mod_base = OTHER; note = thymine
  modified_base 1448..1449: mod_base = OTHER; note = thymine
  modified_base 1454..1455: mod_base = OTHER; note = thymine
  modified_base 1462: mod_base = OTHER; note = thymine
  modified_base 1476: mod_base = OTHER; note = thymine
  modified_base 1479: mod_base = OTHER; note = thymine
  modified_base 1486..1487: mod_base = OTHER; note = thymine
  modified_base 1498: mod_base = OTHER; note = thymine
  modified_base 1501: mod_base = OTHER; note = thymine
  modified_base 1508..1509: mod_base = OTHER; note = thymine
  modified_base 1515..1516: mod_base = OTHER; note = thymine
  modified_base 1518: mod_base = OTHER; note = thymine
  modified_base 1521: mod_base = OTHER; note = thymine
  modified_base 1523..1524: mod_base = OTHER; note = thymine
  modified_base 1535..1536: mod_base = OTHER; note = thymine
  modified_base 1538: mod_base = OTHER; note = thymine
  modified_base 1544: mod_base = OTHER; note = thymine
  modified_base 1546: mod_base = OTHER; note = thymine
  modified_base 1549..1551: mod_base = OTHER; note = thymine
  modified_base 1557..1558: mod_base = OTHER; note = thymine
  modified_base 1561: mod_base = OTHER; note = thymine
  modified_base 1568: mod_base = OTHER; note = thymine
  modified_base 1574: mod_base = OTHER; note = thymine
  modified_base 1586: mod_base = OTHER; note = thymine
  modified_base 1590: mod_base = OTHER; note = thymine
  modified_base 1598: mod_base = OTHER; note = thymine
  modified_base 1603: mod_base = OTHER; note = thymine
  modified_base 1607: mod_base = OTHER; note = thymine
  modified_base 1612: mod_base = OTHER; note = thymine
  modified_base 1614: mod_base = OTHER; note = thymine
  modified_base 1620..1621: mod_base = OTHER; note = thymine
  modified_base 1637: mod_base = OTHER; note = thymine
  modified_base 1643: mod_base = OTHER; note = thymine
  modified_base 1650: mod_base = OTHER; note = thymine
  modified_base 1672: mod_base = OTHER; note = thymine
  modified_base 1682: mod_base = OTHER; note = thymine
  modified_base 1687..1688: mod_base = OTHER; note = thymine
  modified_base 1701: mod_base = OTHER; note = thymine
  modified_base 1713..1714: mod_base = OTHER; note = thymine
  modified_base 1717: mod_base = OTHER; note = thymine
  modified_base 1720..1722: mod_base = OTHER; note = thymine
  modified_base 1727: mod_base = OTHER; note = thymine
  modified_base 1731: mod_base = OTHER; note = thymine
  modified_base 1739: mod_base = OTHER; note = thymine
  modified_base 1742: mod_base = OTHER; note = thymine
  modified_base 1746: mod_base = OTHER; note = thymine
  modified_base 1750: mod_base = OTHER; note = thymine
  modified_base 1752: mod_base = OTHER; note = thymine
  modified_base 1768: mod_base = OTHER; note = thymine
  modified_base 1771..1772: mod_base = OTHER; note = thymine
  modified_base 1774: mod_base = OTHER; note = thymine
  modified_base 1787: mod_base = OTHER; note = thymine
  modified_base 1797: mod_base = OTHER; note = thymine
  modified_base 1800: mod_base = OTHER; note = thymine
  modified_base 1805: mod_base = OTHER; note = thymine
  modified_base 1808: mod_base = OTHER; note = thymine
  modified_base 1811: mod_base = OTHER; note = thymine
  modified_base 1813..1814: mod_base = OTHER; note = thymine
  modified_base 1826..1827: mod_base = OTHER; note = thymine
  modified_base 1833: mod_base = OTHER; note = thymine
  modified_base 1837: mod_base = OTHER; note = thymine
  modified_base 1840..1842: mod_base = OTHER; note = thymine
  modified_base 1848: mod_base = OTHER; note = thymine
  modified_base 1852..1853: mod_base = OTHER; note = thymine
  modified_base 1856: mod_base = OTHER; note = thymine
  modified_base 1864: mod_base = OTHER; note = thymine
  modified_base 1869..1871: mod_base = OTHER; note = thymine
  modified_base 1875: mod_base = OTHER; note = thymine
  modified_base 1880: mod_base = OTHER; note = thymine
  modified_base 1884: mod_base = OTHER; note = thymine
  modified_base 1888: mod_base = OTHER; note = thymine
  modified_base 1892..1894: mod_base = OTHER; note = thymine
  modified_base 1896..1899: mod_base = OTHER; note = thymine
  modified_base 1901: mod_base = OTHER; note = thymine
  modified_base 1905: mod_base = OTHER; note = thymine
  modified_base 1909: mod_base = OTHER; note = thymine
  modified_base 1915: mod_base = OTHER; note = thymine
  modified_base 1921: mod_base = OTHER; note = thymine
  modified_base 1923..1924: mod_base = OTHER; note = thymine
  modified_base 1932: mod_base = OTHER; note = thymine
  modified_base 1934..1936: mod_base = OTHER; note = thymine
  modified_base 1938: mod_base = OTHER; note = thymine
  modified_base 1940: mod_base = OTHER; note = thymine
  modified_base 1942: mod_base = OTHER; note = thymine
  modified_base 1947..1950: mod_base = OTHER; note = thymine
  modified_base 1953: mod_base = OTHER; note = thymine
  modified_base 1955..1957: mod_base = OTHER; note = thymine
  modified_base 1959..1962: mod_base = OTHER; note = thymine
  modified_base 1966: mod_base = OTHER; note = thymine
  modified_base 1968: mod_base = OTHER; note = thymine
  modified_base 1970: mod_base = OTHER; note = thymine
  modified_base 1975: mod_base = OTHER; note = thymine
  modified_base 1977..1978: mod_base = OTHER; note = thymine
  modified_base 1980..1981: mod_base = OTHER; note = thymine
  modified_base 1983: mod_base = OTHER; note = thymine
  modified_base 1986: mod_base = OTHER; note = thymine
  modified_base 1992: mod_base = OTHER; note = thymine
  modified_base 1994: mod_base = OTHER; note = thymine
  modified_base 1997..1998: mod_base = OTHER; note = thymine
  modified_base 2000: mod_base = OTHER; note = thymine
  modified_base 2004: mod_base = OTHER; note = thymine
  modified_base 2007..2009: mod_base = OTHER; note = thymine
  modified_base 2011..2014: mod_base = OTHER; note = thymine
  modified_base 2020: mod_base = OTHER; note = thymine
  modified_base 2022: mod_base = OTHER; note = thymine
  modified_base 2024..2025: mod_base = OTHER; note = thymine
  modified_base 2027: mod_base = OTHER; note = thymine
  modified_base 2030: mod_base = OTHER; note = thymine
  modified_base 2034: mod_base = OTHER; note = thymine
  modified_base 2036..2037: mod_base = OTHER; note = thymine
  modified_base 2042..2045: mod_base = OTHER; note = thymine
  modified_base 2047: mod_base = OTHER; note = thymine
  modified_base 2056: mod_base = OTHER; note = thymine
  modified_base 2061..2062: mod_base = OTHER; note = thymine
  modified_base 2065: mod_base = OTHER; note = thymine
  modified_base 2068..2069: mod_base = OTHER; note = thymine
  modified_base 2072: mod_base = OTHER; note = thymine
  modified_base 2076..2077: mod_base = OTHER; note = thymine
  modified_base 2080: mod_base = OTHER; note = thymine
  modified_base 2085: mod_base = OTHER; note = thymine
  modified_base 2087: mod_base = OTHER; note = thymine
  modified_base 2090: mod_base = OTHER; note = thymine
  modified_base 2097: mod_base = OTHER; note = thymine
  modified_base 2102: mod_base = OTHER; note = thymine
  modified_base 2104..2106: mod_base = OTHER; note = thymine
  modified_base 2108: mod_base = OTHER; note = thymine
  modified_base 2113: mod_base = OTHER; note = thymine
  modified_base 2116..2117: mod_base = OTHER; note = thymine
  modified_base 2120: mod_base = OTHER; note = thymine
  modified_base 2122: mod_base = OTHER; note = thymine
  modified_base 2125: mod_base = OTHER; note = thymine
  modified_base 2127: mod_base = OTHER; note = thymine
  modified_base 2129: mod_base = OTHER; note = thymine
  modified_base 2133: mod_base = OTHER; note = thymine
  modified_base 2139: mod_base = OTHER; note = thymine
  modified_base 2145..2146: mod_base = OTHER; note = thymine
  modified_base 2154: mod_base = OTHER; note = thymine
  modified_base 2160: mod_base = OTHER; note = thymine
  modified_base 2168..2169: mod_base = OTHER; note = thymine
  modified_base 2172..2174: mod_base = OTHER; note = thymine
  modified_base 2176: mod_base = OTHER; note = thymine
  modified_base 2178: mod_base = OTHER; note = thymine
  modified_base 2183: mod_base = OTHER; note = thymine
  modified_base 2185: mod_base = OTHER; note = thymine
  modified_base 2190..2192: mod_base = OTHER; note = thymine
  modified_base 2194..2196: mod_base = OTHER; note = thymine
  modified_base 2203..2204: mod_base = OTHER; note = thymine
  modified_base 2207: mod_base = OTHER; note = thymine
  modified_base 2210: mod_base = OTHER; note = thymine
  modified_base 2212: mod_base = OTHER; note = thymine
  modified_base 2215..2216: mod_base = OTHER; note = thymine
  modified_base 2220..2221: mod_base = OTHER; note = thymine
  modified_base 2224: mod_base = OTHER; note = thymine
  modified_base 2226..2227: mod_base = OTHER; note = thymine
  modified_base 2229..2230: mod_base = OTHER; note = thymine
  modified_base 2232: mod_base = OTHER; note = thymine
  modified_base 2239: mod_base = OTHER; note = thymine
  modified_base 2244: mod_base = OTHER; note = thymine
  modified_base 2246: mod_base = OTHER; note = thymine
  modified_base 2248: mod_base = OTHER; note = thymine
  modified_base 2250: mod_base = OTHER; note = thymine
  modified_base 2255: mod_base = OTHER; note = thymine
  modified_base 2257: mod_base = OTHER; note = thymine
  modified_base 2259: mod_base = OTHER; note = thymine
  modified_base 2261..2262: mod_base = OTHER; note = thymine
  modified_base 2266..2268: mod_base = OTHER; note = thymine
  modified_base 2272: mod_base = OTHER; note = thymine
  modified_base 2274: mod_base = OTHER; note = thymine
  modified_base 2279..2281: mod_base = OTHER; note = thymine
  modified_base 2283: mod_base = OTHER; note = thymine
  modified_base 2286..2287: mod_base = OTHER; note = thymine
  modified_base 2289: mod_base = OTHER; note = thymine
  modified_base 2291: mod_base = OTHER; note = thymine
  modified_base 2294: mod_base = OTHER; note = thymine
  modified_base 2299: mod_base = OTHER; note = thymine
  modified_base 2307: mod_base = OTHER; note = thymine
  modified_base 2310: mod_base = OTHER; note = thymine
  modified_base 2312: mod_base = OTHER; note = thymine
  modified_base 2315..2317: mod_base = OTHER; note = thymine
  modified_base 2320: mod_base = OTHER; note = thymine
  modified_base 2324: mod_base = OTHER; note = thymine
  modified_base 2326: mod_base = OTHER; note = thymine
  modified_base 2335: mod_base = OTHER; note = thymine
  modified_base 2337..2338: mod_base = OTHER; note = thymine
  modified_base 2340: mod_base = OTHER; note = thymine
  modified_base 2343: mod_base = OTHER; note = thymine
  modified_base 2350: mod_base = OTHER; note = thymine
  modified_base 2352..2353: mod_base = OTHER; note = thymine
  modified_base 2355..2358: mod_base = OTHER; note = thymine
  modified_base 2364..2365: mod_base = OTHER; note = thymine
  modified_base 2367: mod_base = OTHER; note = thymine
  modified_base 2373: mod_base = OTHER; note = thymine
  modified_base 2389..2390: mod_base = OTHER; note = thymine
  modified_base 2394: mod_base = OTHER; note = thymine
  modified_base 2398..2399: mod_base = OTHER; note = thymine
  modified_base 2411: mod_base = OTHER; note = thymine
  modified_base 2415: mod_base = OTHER; note = thymine
  modified_base 2424: mod_base = OTHER; note = thymine
  modified_base 2430: mod_base = OTHER; note = thymine
  modified_base 2440: mod_base = OTHER; note = thymine
  modified_base 2442: mod_base = OTHER; note = thymine
  modified_base 2445..2448: mod_base = OTHER; note = thymine
  modified_base 2450: mod_base = OTHER; note = thymine
  modified_base 2453: mod_base = OTHER; note = thymine
  modified_base 2458..2460: mod_base = OTHER; note = thymine
  modified_base 2466: mod_base = OTHER; note = thymine
  modified_base 2468: mod_base = OTHER; note = thymine
  modified_base 2470..2473: mod_base = OTHER; note = thymine
  modified_base 2476..2478: mod_base = OTHER; note = thymine
  modified_base 2485..2486: mod_base = OTHER; note = thymine
  modified_base 2489..2491: mod_base = OTHER; note = thymine
  modified_base 2493..2494: mod_base = OTHER; note = thymine
  modified_base 2504..2506: mod_base = OTHER; note = thymine
  modified_base 2508..2509: mod_base = OTHER; note = thymine
  modified_base 2513: mod_base = OTHER; note = thymine
  modified_base 2518..2519: mod_base = OTHER; note = thymine
  modified_base 2524: mod_base = OTHER; note = thymine
  modified_base 2526: mod_base = OTHER; note = thymine
  modified_base 2530: mod_base = OTHER; note = thymine
  modified_base 2534: mod_base = OTHER; note = thymine
  modified_base 2536: mod_base = OTHER; note = thymine
  modified_base 2545..2546: mod_base = OTHER; note = thymine
  modified_base 2550: mod_base = OTHER; note = thymine
  modified_base 2552: mod_base = OTHER; note = thymine
  modified_base 2558: mod_base = OTHER; note = thymine
  modified_base 2560: mod_base = OTHER; note = thymine
  modified_base 2574: mod_base = OTHER; note = thymine
  modified_base 2578: mod_base = OTHER; note = thymine
  modified_base 2580: mod_base = OTHER; note = thymine
  modified_base 2583: mod_base = OTHER; note = thymine
  modified_base 2592..2593: mod_base = OTHER; note = thymine
  modified_base 2598: mod_base = OTHER; note = thymine
  modified_base 2600: mod_base = OTHER; note = thymine
  modified_base 2603: mod_base = OTHER; note = thymine
  modified_base 2611..2612: mod_base = OTHER; note = thymine
  modified_base 2615: mod_base = OTHER; note = thymine
  modified_base 2623: mod_base = OTHER; note = thymine
  modified_base 2625: mod_base = OTHER; note = thymine
  modified_base 2627..2628: mod_base = OTHER; note = thymine
  modified_base 2630..2631: mod_base = OTHER; note = thymine
  modified_base 2636: mod_base = OTHER; note = thymine
  modified_base 2638: mod_base = OTHER; note = thymine
  modified_base 2641: mod_base = OTHER; note = thymine
  modified_base 2646: mod_base = OTHER; note = thymine
  modified_base 2648: mod_base = OTHER; note = thymine
  modified_base 2651: mod_base = OTHER; note = thymine
  modified_base 2656: mod_base = OTHER; note = thymine
  modified_base 2662: mod_base = OTHER; note = thymine
  modified_base 2665: mod_base = OTHER; note = thymine
  modified_base 2667: mod_base = OTHER; note = thymine
  modified_base 2680: mod_base = OTHER; note = thymine
  modified_base 2687: mod_base = OTHER; note = thymine
  modified_base 2689..2690: mod_base = OTHER; note = thymine
  modified_base 2706: mod_base = OTHER; note = thymine
  modified_base 2714: mod_base = OTHER; note = thymine
  modified_base 2716: mod_base = OTHER; note = thymine
  modified_base 2719: mod_base = OTHER; note = thymine
  modified_base 2721: mod_base = OTHER; note = thymine
  modified_base 2729..2730: mod_base = OTHER; note = thymine
  modified_base 2734: mod_base = OTHER; note = thymine
  modified_base 2736: mod_base = OTHER; note = thymine
  modified_base 2738..2740: mod_base = OTHER; note = thymine
  modified_base 2746: mod_base = OTHER; note = thymine
  modified_base 2748..2749: mod_base = OTHER; note = thymine
  modified_base 2752: mod_base = OTHER; note = thymine
  modified_base 2755: mod_base = OTHER; note = thymine
  modified_base 2761: mod_base = OTHER; note = thymine
  modified_base 2764..2767: mod_base = OTHER; note = thymine
  modified_base 2770..2772: mod_base = OTHER; note = thymine
  modified_base 2784: mod_base = OTHER; note = thymine
  modified_base 2788: mod_base = OTHER; note = thymine
  modified_base 2791..2792: mod_base = OTHER; note = thymine
  modified_base 2797: mod_base = OTHER; note = thymine
  modified_base 2803: mod_base = OTHER; note = thymine
  modified_base 2810: mod_base = OTHER; note = thymine
  modified_base 2816: mod_base = OTHER; note = thymine
  modified_base 2821..2822: mod_base = OTHER; note = thymine
  modified_base 2825..2828: mod_base = OTHER; note = thymine
  modified_base 2830: mod_base = OTHER; note = thymine
  modified_base 2835..2836: mod_base = OTHER; note = thymine
  modified_base 2838: mod_base = OTHER; note = thymine
  modified_base 2840..2842: mod_base = OTHER; note = thymine
  modified_base 2844: mod_base = OTHER; note = thymine
  modified_base 2848: mod_base = OTHER; note = thymine
  modified_base 2851..2853: mod_base = OTHER; note = thymine
  modified_base 2857..2859: mod_base = OTHER; note = thymine
  modified_base 2864: mod_base = OTHER; note = thymine
  modified_base 2869: mod_base = OTHER; note = thymine
  modified_base 2871: mod_base = OTHER; note = thymine
  modified_base 2874: mod_base = OTHER; note = thymine
  modified_base 2877..2878: mod_base = OTHER; note = thymine
  modified_base 2880..2882: mod_base = OTHER; note = thymine
  modified_base 2884: mod_base = OTHER; note = thymine
  modified_base 2886: mod_base = OTHER; note = thymine
  modified_base 2889: mod_base = OTHER; note = thymine
  modified_base 2891: mod_base = OTHER; note = thymine
  modified_base 2893: mod_base = OTHER; note = thymine
  modified_base 2896: mod_base = OTHER; note = thymine
  modified_base 2898..2899: mod_base = OTHER; note = thymine
  modified_base 2901..2903: mod_base = OTHER; note = thymine
  modified_base 2909..2910: mod_base = OTHER; note = thymine
  modified_base 2912: mod_base = OTHER; note = thymine
  modified_base 2914: mod_base = OTHER; note = thymine
  modified_base 2916..2919: mod_base = OTHER; note = thymine
  modified_base 2921: mod_base = OTHER; note = thymine
  modified_base 2923..2924: mod_base = OTHER; note = thymine
  modified_base 2929: mod_base = OTHER; note = thymine
  modified_base 2932: mod_base = OTHER; note = thymine
  modified_base 2934..2935: mod_base = OTHER; note = thymine
  modified_base 2939..2942: mod_base = OTHER; note = thymine
  modified_base 2946..2947: mod_base = OTHER; note = thymine
  modified_base 2950: mod_base = OTHER; note = thymine
  modified_base 2954..2956: mod_base = OTHER; note = thymine
  modified_base 2960: mod_base = OTHER; note = thymine
  modified_base 2963..2964: mod_base = OTHER; note = thymine
  modified_base 2970..2971: mod_base = OTHER; note = thymine
  modified_base 2979: mod_base = OTHER; note = thymine
  modified_base 2984: mod_base = OTHER; note = thymine
  modified_base 2991: mod_base = OTHER; note = thymine
  modified_base 2994..2996: mod_base = OTHER; note = thymine
  modified_base 3002: mod_base = OTHER; note = thymine
  modified_base 3004: mod_base = OTHER; note = thymine
  modified_base 3009..3010: mod_base = OTHER; note = thymine
  modified_base 3013: mod_base = OTHER; note = thymine
  modified_base 3016: mod_base = OTHER; note = thymine
  modified_base 3025..3026: mod_base = OTHER; note = thymine
  modified_base 3031..3033: mod_base = OTHER; note = thymine
  modified_base 3036..3038: mod_base = OTHER; note = thymine
  modified_base 3050: mod_base = OTHER; note = thymine
  modified_base 3053: mod_base = OTHER; note = thymine
  modified_base 3056: mod_base = OTHER; note = thymine
  modified_base 3060..3063: mod_base = OTHER; note = thymine
  modified_base 3065..3066: mod_base = OTHER; note = thymine
  modified_base 3069: mod_base = OTHER; note = thymine
  modified_base 3071: mod_base = OTHER; note = thymine
  modified_base 3073..3074: mod_base = OTHER; note = thymine
  modified_base 3076..3077: mod_base = OTHER; note = thymine
  modified_base 3079: mod_base = OTHER; note = thymine
  modified_base 3085: mod_base = OTHER; note = thymine
  modified_base 3088: mod_base = OTHER; note = thymine
  modified_base 3090: mod_base = OTHER; note = thymine
  modified_base 3094..3096: mod_base = OTHER; note = thymine
  modified_base 3102: mod_base = OTHER; note = thymine
  modified_base 3104: mod_base = OTHER; note = thymine
  modified_base 3106: mod_base = OTHER; note = thymine
  modified_base 3108..3109: mod_base = OTHER; note = thymine
  modified_base 3117: mod_base = OTHER; note = thymine
  modified_base 3119: mod_base = OTHER; note = thymine
  modified_base 3121..3125: mod_base = OTHER; note = thymine
  modified_base 3129..3135: mod_base = OTHER; note = thymine
  modified_base 3139: mod_base = OTHER; note = thymine
  modified_base 3143: mod_base = OTHER; note = thymine
  modified_base 3146: mod_base = OTHER; note = thymine
  modified_base 3153..3154: mod_base = OTHER; note = thymine
  modified_base 3156: mod_base = OTHER; note = thymine
  modified_base 3158: mod_base = OTHER; note = thymine
  modified_base 3160: mod_base = OTHER; note = thymine
  modified_base 3162: mod_base = OTHER; note = thymine
  modified_base 3165: mod_base = OTHER; note = thymine
  modified_base 3167: mod_base = OTHER; note = thymine
  modified_base 3172..3174: mod_base = OTHER; note = thymine
  modified_base 3177: mod_base = OTHER; note = thymine
  modified_base 3179..3183: mod_base = OTHER; note = thymine
  modified_base 3185..3187: mod_base = OTHER; note = thymine
  modified_base 3189..3190: mod_base = OTHER; note = thymine
  modified_base 3192: mod_base = OTHER; note = thymine
  modified_base 3195: mod_base = OTHER; note = thymine
  modified_base 3197..3199: mod_base = OTHER; note = thymine
  modified_base 3201..3202: mod_base = OTHER; note = thymine
  modified_base 3204: mod_base = OTHER; note = thymine
  modified_base 3206: mod_base = OTHER; note = thymine
  modified_base 3213: mod_base = OTHER; note = thymine
  modified_base 3218: mod_base = OTHER; note = thymine
  modified_base 3222..3224: mod_base = OTHER; note = thymine
  modified_base 3230: mod_base = OTHER; note = thymine
  modified_base 3239: mod_base = OTHER; note = thymine
  modified_base 3249: mod_base = OTHER; note = thymine
  modified_base 3253..3254: mod_base = OTHER; note = thymine
  modified_base 3256..3258: mod_base = OTHER; note = thymine
  modified_base 3260..3262: mod_base = OTHER; note = thymine
  modified_base 3264: mod_base = OTHER; note = thymine
  modified_base 3268..3269: mod_base = OTHER; note = thymine
  modified_base 3271: mod_base = OTHER; note = thymine
  modified_base 3273..3275: mod_base = OTHER; note = thymine
  modified_base 3280: mod_base = OTHER; note = thymine
  modified_base 3284..3287: mod_base = OTHER; note = thymine
  modified_base 3290: mod_base = OTHER; note = thymine
  modified_base 3293: mod_base = OTHER; note = thymine
  modified_base 3295..3297: mod_base = OTHER; note = thymine
  modified_base 3300: mod_base = OTHER; note = thymine
  modified_base 3302: mod_base = OTHER; note = thymine
  modified_base 3305..3307: mod_base = OTHER; note = thymine
  modified_base 3310: mod_base = OTHER; note = thymine
  modified_base 3314: mod_base = OTHER; note = thymine
  modified_base 3316..3317: mod_base = OTHER; note = thymine
  modified_base 3321: mod_base = OTHER; note = thymine
  modified_base 3323: mod_base = OTHER; note = thymine
  modified_base 3325: mod_base = OTHER; note = thymine
  modified_base 3328: mod_base = OTHER; note = thymine
  modified_base 3332: mod_base = OTHER; note = thymine
  modified_base 3334: mod_base = OTHER; note = thymine
  modified_base 3338..3340: mod_base = OTHER; note = thymine
  modified_base 3353..3355: mod_base = OTHER; note = thymine
  modified_base 3357..3358: mod_base = OTHER; note = thymine
  modified_base 3362: mod_base = OTHER; note = thymine
  modified_base 3364..3366: mod_base = OTHER; note = thymine
  modified_base 3369: mod_base = OTHER; note = thymine
  modified_base 3371: mod_base = OTHER; note = thymine
  modified_base 3377: mod_base = OTHER; note = thymine
  modified_base 3381..3383: mod_base = OTHER; note = thymine
  modified_base 3387..3389: mod_base = OTHER; note = thymine
  modified_base 3391: mod_base = OTHER; note = thymine
  modified_base 3393..3395: mod_base = OTHER; note = thymine
  modified_base 3398: mod_base = OTHER; note = thymine
  modified_base 3413: mod_base = OTHER; note = thymine
  modified_base 3418: mod_base = OTHER; note = thymine
  modified_base 3420: mod_base = OTHER; note = thymine
  modified_base 3427: mod_base = OTHER; note = thymine
  modified_base 3432: mod_base = OTHER; note = thymine
  modified_base 3436: mod_base = OTHER; note = thymine
  modified_base 3440: mod_base = OTHER; note = thymine
  modified_base 3442: mod_base = OTHER; note = thymine
  modified_base 3445: mod_base = OTHER; note = thymine
  modified_base 3448: mod_base = OTHER; note = thymine
  modified_base 3458: mod_base = OTHER; note = thymine
  modified_base 3460..3461: mod_base = OTHER; note = thymine
  modified_base 3463..3464: mod_base = OTHER; note = thymine
  modified_base 3466..3467: mod_base = OTHER; note = thymine
  modified_base 3471: mod_base = OTHER; note = thymine
  modified_base 3473: mod_base = OTHER; note = thymine
  modified_base 3475: mod_base = OTHER; note = thymine
  modified_base 3477: mod_base = OTHER; note = thymine
  modified_base 3485: mod_base = OTHER; note = thymine
  modified_base 3488: mod_base = OTHER; note = thymine
  modified_base 3490: mod_base = OTHER; note = thymine
  modified_base 3492: mod_base = OTHER; note = thymine
  modified_base 3498..3501: mod_base = OTHER; note = thymine
  modified_base 3503..3506: mod_base = OTHER; note = thymine
  modified_base 3508: mod_base = OTHER; note = thymine
  modified_base 3511..3513: mod_base = OTHER; note = thymine
  modified_base 3515: mod_base = OTHER; note = thymine
  modified_base 3517: mod_base = OTHER; note = thymine
  modified_base 3522: mod_base = OTHER; note = thymine
  modified_base 3524: mod_base = OTHER; note = thymine
  modified_base 3529..3530: mod_base = OTHER; note = thymine
  modified_base 3534..3536: mod_base = OTHER; note = thymine
  modified_base 3539: mod_base = OTHER; note = thymine
  modified_base 3542: mod_base = OTHER; note = thymine
  modified_base 3544: mod_base = OTHER; note = thymine
  modified_base 3547..3548: mod_base = OTHER; note = thymine
  modified_base 3555: mod_base = OTHER; note = thymine
  modified_base 3560..3563: mod_base = OTHER; note = thymine
  modified_base 3565..3567: mod_base = OTHER; note = thymine
  modified_base 3569: mod_base = OTHER; note = thymine
  modified_base 3575..3576: mod_base = OTHER; note = thymine
  modified_base 3581: mod_base = OTHER; note = thymine
  modified_base 3584: mod_base = OTHER; note = thymine
  modified_base 3586: mod_base = OTHER; note = thymine
  modified_base 3590..3591: mod_base = OTHER; note = thymine
  modified_base 3595: mod_base = OTHER; note = thymine
  modified_base 3598: mod_base = OTHER; note = thymine
  modified_base 3601..3602: mod_base = OTHER; note = thymine
  modified_base 3607: mod_base = OTHER; note = thymine
  modified_base 3609: mod_base = OTHER; note = thymine
  modified_base 3622: mod_base = OTHER; note = thymine
  modified_base 3625..3626: mod_base = OTHER; note = thymine
  modified_base 3629..3630: mod_base = OTHER; note = thymine
  modified_base 3632: mod_base = OTHER; note = thymine
  modified_base 3635..3636: mod_base = OTHER; note = thymine
  modified_base 3643..3645: mod_base = OTHER; note = thymine
  modified_base 3648: mod_base = OTHER; note = thymine
  modified_base 3658: mod_base = OTHER; note = thymine
  modified_base 3660: mod_base = OTHER; note = thymine
  modified_base 3663: mod_base = OTHER; note = thymine
  modified_base 3667: mod_base = OTHER; note = thymine
  modified_base 3677: mod_base = OTHER; note = thymine
  modified_base 3680: mod_base = OTHER; note = thymine
  modified_base 3688..3689: mod_base = OTHER; note = thymine
  modified_base 3692: mod_base = OTHER; note = thymine
  modified_base 3698..3701: mod_base = OTHER; note = thymine
  modified_base 3706..3707: mod_base = OTHER; note = thymine
  modified_base 3712: mod_base = OTHER; note = thymine
  modified_base 3717: mod_base = OTHER; note = thymine
  modified_base 3724: mod_base = OTHER; note = thymine
  modified_base 3732..3734: mod_base = OTHER; note = thymine
  modified_base 3737..3739: mod_base = OTHER; note = thymine
  modified_base 3743: mod_base = OTHER; note = thymine
  modified_base 3745..3746: mod_base = OTHER; note = thymine
  modified_base 3754..3755: mod_base = OTHER; note = thymine
  modified_base 3757: mod_base = OTHER; note = thymine
  modified_base 3760: mod_base = OTHER; note = thymine
  modified_base 3762: mod_base = OTHER; note = thymine
  modified_base 3766: mod_base = OTHER; note = thymine
  modified_base 3776: mod_base = OTHER; note = thymine
  modified_base 3780..3781: mod_base = OTHER; note = thymine
  modified_base 3785..3787: mod_base = OTHER; note = thymine
  modified_base 3796: mod_base = OTHER; note = thymine
  modified_base 3802..3803: mod_base = OTHER; note = thymine
  modified_base 3816: mod_base = OTHER; note = thymine
  modified_base 3818: mod_base = OTHER; note = thymine
  modified_base 3829: mod_base = OTHER; note = thymine
  modified_base 3832..3833: mod_base = OTHER; note = thymine
  modified_base 3835: mod_base = OTHER; note = thymine
  modified_base 3837..3838: mod_base = OTHER; note = thymine
  modified_base 3840: mod_base = OTHER; note = thymine
  modified_base 3842: mod_base = OTHER; note = thymine
  modified_base 3844..3846: mod_base = OTHER; note = thymine
  modified_base 3848: mod_base = OTHER; note = thymine
  modified_base 3852: mod_base = OTHER; note = thymine
  modified_base 3854: mod_base = OTHER; note = thymine
  modified_base 3858..3860: mod_base = OTHER; note = thymine
  modified_base 3862: mod_base = OTHER; note = thymine
  modified_base 3867: mod_base = OTHER; note = thymine
  modified_base 3870..3872: mod_base = OTHER; note = thymine
  modified_base 3874: mod_base = OTHER; note = thymine
  modified_base 3876: mod_base = OTHER; note = thymine
  modified_base 3882: mod_base = OTHER; note = thymine
  modified_base 3884..3885: mod_base = OTHER; note = thymine
  modified_base 3887..3889: mod_base = OTHER; note = thymine
  modified_base 3891: mod_base = OTHER; note = thymine
  modified_base 3893: mod_base = OTHER; note = thymine
  modified_base 3897..3898: mod_base = OTHER; note = thymine
  modified_base 3911: mod_base = OTHER; note = thymine
  modified_base 3913: mod_base = OTHER; note = thymine
  modified_base 3917: mod_base = OTHER; note = thymine
  modified_base 3930: mod_base = OTHER; note = thymine
  modified_base 3933: mod_base = OTHER; note = thymine
  modified_base 3935: mod_base = OTHER; note = thymine
  modified_base 3938: mod_base = OTHER; note = thymine
  modified_base 3942: mod_base = OTHER; note = thymine
  modified_base 3944: mod_base = OTHER; note = thymine
  modified_base 3946..3947: mod_base = OTHER; note = thymine
  modified_base 3950: mod_base = OTHER; note = thymine
  modified_base 3954: mod_base = OTHER; note = thymine
  modified_base 3957: mod_base = OTHER; note = thymine
  modified_base 3960..3963: mod_base = OTHER; note = thymine
  modified_base 3966: mod_base = OTHER; note = thymine
  modified_base 3968..3969: mod_base = OTHER; note = thymine
  modified_base 3973..3975: mod_base = OTHER; note = thymine
  modified_base 3977: mod_base = OTHER; note = thymine
  modified_base 3985..3987: mod_base = OTHER; note = thymine
  modified_base 3989: mod_base = OTHER; note = thymine
  modified_base 3993..3996: mod_base = OTHER; note = thymine
  modified_base 3998: mod_base = OTHER; note = thymine
  modified_base 4000: mod_base = OTHER; note = thymine
  modified_base 4003: mod_base = OTHER; note = thymine
  modified_base 4005..4007: mod_base = OTHER; note = thymine
  modified_base 4010: mod_base = OTHER; note = thymine
  modified_base 4013: mod_base = OTHER; note = thymine
  modified_base 4017: mod_base = OTHER; note = thymine
  modified_base 4022: mod_base = OTHER; note = thymine
  modified_base 4032: mod_base = OTHER; note = thymine
  modified_base 4035: mod_base = OTHER; note = thymine
  modified_base 4037: mod_base = OTHER; note = thymine
  modified_base 4039: mod_base = OTHER; note = thymine
  modified_base 4042..4043: mod_base = OTHER; note = thymine
  modified_base 4045: mod_base = OTHER; note = thymine
  modified_base 4049..4051: mod_base = OTHER; note = thymine
  modified_base 4054..4055: mod_base = OTHER; note = thymine
  modified_base 4057: mod_base = OTHER; note = thymine
  modified_base 4061..4065: mod_base = OTHER; note = thymine
  modified_base 4067: mod_base = OTHER; note = thymine
  modified_base 4071: mod_base = OTHER; note = thymine
  modified_base 4075..4076: mod_base = OTHER; note = thymine
  modified_base 4079..4081: mod_base = OTHER; note = thymine
  modified_base 4084: mod_base = OTHER; note = thymine
  modified_base 4089: mod_base = OTHER; note = thymine
  modified_base 4091: mod_base = OTHER; note = thymine
  modified_base 4094..4095: mod_base = OTHER; note = thymine
  modified_base 4097..4099: mod_base = OTHER; note = thymine
  modified_base 4101..4104: mod_base = OTHER; note = thymine
  modified_base 4106..4107: mod_base = OTHER; note = thymine
  modified_base 4110..4111: mod_base = OTHER; note = thymine
  modified_base 4114: mod_base = OTHER; note = thymine
  modified_base 4124: mod_base = OTHER; note = thymine
  modified_base 4126: mod_base = OTHER; note = thymine
  modified_base 4130..4133: mod_base = OTHER; note = thymine
  modified_base 4135..4136: mod_base = OTHER; note = thymine
  modified_base 4138..4140: mod_base = OTHER; note = thymine
  modified_base 4142..4145: mod_base = OTHER; note = thymine
  modified_base 4147: mod_base = OTHER; note = thymine
  modified_base 4149..4151: mod_base = OTHER; note = thymine
  modified_base 4154: mod_base = OTHER; note = thymine
  modified_base 4159: mod_base = OTHER; note = thymine
  modified_base 4162..4163: mod_base = OTHER; note = thymine
  modified_base 4166..4168: mod_base = OTHER; note = thymine
  misc_feature 1..4170: note = Cynomolgus Monkey CD274 mRNA
  source 1..4170: mol_type = mRNA
cacacacacgcacacacccctactttctagaataaaaaccaaagccatatgggtctgctgttgactttctatatgtcgtagagttatatcaagttaggtcaagatgttcagtcaccttgaagacgcttttatcagaaagggggaaacctttctgataaaggttaaggggtaaccttaagctgtcacccctctgaaggtaaaatcaaggtgcgttcagatgttggcttgttgtaaatttctgtttatattaataacataccaaatgtggatttgttttaatcttcggaactctttccggtgaaaacctcatttacaagaaaactggactgacaggtttcactttctgtttcatttctatacatagctttattcctaggacaccaacaccactcgctacccaaactgaaagcttccccgattccgccgaaggtcaggaaagtccaatgccgggcaaactggatttgctgccttgcgcagaggtgggcgggaccccgcctccgggccgggcgccaagttgagcagctggcacgcctcgcgaagccccagtcctgaagccccagtcctgcgctgcttcccgaggctccgcaccagccgcgcttctctctgcctgcagcacattccagaaagatgaggatatttgctgtctttatattcacgatctactggcatttgctgaatgcatttactgtcacggttcccaaggacctatatgtggtagagtatggcagcaatatgacaattgaatgcaaattcccagtagaaaaacaattagacctgacttcactaattgtctattgggaaatggaggataagaacattattcaatttgtgcatggagaggaagacctgaaggttcagcatagtaactacagacagagggcccagctgttgaaggaccagctctccctgggaaatgctgcacttcggatcacagatgtgaaattgcaggatgcaggggtttaccgctgcatgatcagctatggtggtgccgactacaagcggattaccgtgaaagtcaatgctccatacaacaaaatcaaccaaagaattttggttgtcgatccagtcacctctgaacatgaactaacatgtcaggctgagggctaccccaaggccgaagtcatttggacaagcagtgaccatcaagtcctgagtggtaagaccaccaccaccaattccaagagagaggagaagcttttaaatgtgaccagcacactgagaatcaacacaacagctaatgagattttctactgcatttttaggagattagatcctgaggaaaaccatacagctgaattggtcatcccagaactacctctggcgcttcctccaaatgaaaggactcacttggtaattctgggagccatctttttactccttggtgtagcactgacattcatcttctatttaagaaaagggagaatgatggatatgaaaaaatgtggcattcgagttacaaactcaaagaagcaacgtgatacacaattggaggagacgtaatccagcattggaacttctgatcttcaagcagggattctcagcctgtggtttgggggttcgtcagggctgagcatgaccagaggaatgaatgggcccgtgggatgcatgcagtatgggacttaaaaggcccaagcactgaaaatggaacctggcgaaagcagaggaggagaatgaagaaaaatggagttgaacagggagcgtggagggagaccttgatactttcaaatgcctgaggggctcatcggtgcatgtgacagggagaaaggatacttctgaacaaggagcctccaagcaaatcatccactgctcatcttaggaaaacgggttgagaatccctaatttgagggtcagttcctgcagaagtgccctttgcctccactcaatgcctcaatttgttttctgcgtgactgagggtcccagtgttggaacagtatttatgtatgagattttcctatttattttgagtctgtgaggtcttcttgtcatgggagtgtggttgtgaatgatttcttttgaagatatattgtagtagatgttacaattttgtcgccaaactaaacttgatgcttaatgacttgctcacatctagtaaaacatggagtatttgtaaggtgcttggtctcctctataactacaagtacacattggaagcataaagatcaaaccgttgatttgtataggatgtcacctttatttaacccattaatactctgattgacttaatcttattctcagacctcaagtgtctgtgcagtatctgttccatttaaatatcagctttataattatgtggtaccatacacacataatctcctttcatcgctgtaaccaccctgttgtgatgaccactattattttacccattgtacagctgaggaagcaaacagattaagtaacttgccaaaaccagtaaatagcagagctcagactgccacccactgtccttttataatacaatttacagctatattttactttaagcaattcatttattcaaaacccatttattaagtgcccttgcaatatcaatcactgtaccaggcattgaatctacagatgtgagcaagagaaagtacctgtcctcaaggagcttggagtataataaggagattaataagaaaatatattattacaatctagtccagtgtcatagcataaggatgatgtgaggagaaaagctgagcagtgttgccaagaggaggaaataggccaatgtggtctgggacagttgaatgtatttaaacatcttaataatcaaagtaattttcatttacaaagagaagtcagtacttaaaataaccctgaaaaataacactggaattccttttctagcattatatttatccctgatttgcctttgccatacaatctaatgcttgtttatatagtgtctgatattgtttaacagttctgtcttttctattcaaatgctattaaattttaaattcatacctttccatgattcaaaattcaaaagatcccatgggagatggtttgaaaatctccacttcatcctccaagccattcaagtttcctttccagaagcaactgctactgccttttattcatatgttcttctaaagatagtctacatttggaaatgtatgttaaaagcatatatttttaaatttttttccctaaatagtaacacattatatgtctgctgtgcactttgctatttttatttattgtagtgtttcttatgtagcagatggaatgaatttgaagctcccaagggtcaggacacatgccttctttgtttctaagttatctttcccatagcttttcataatctttcatatgatttagtacatgttaaatatgtgctacatatacatttagacaaccagcatttgttaagtatttgctctaggactgagtttggatttatgtttgctcaaaaggagacccatgggctctccagggtgcactgagtcaatctagtcctaaaaagcaatcttattattaactctgtatgacagaatcatatctggaacttttgttttctgctttctgtcaagtataaacttcactttgatgctgtacttgcaaaatcacattttctttctggaaattccagtagtgtaccttgactgctagttaccctgtgccagaaaagcctcattcgttgtgcttgaaccctttaatgccaccagctgtcatcactacacaggcctcctaagaggcttcctggaggttttgagattcagatgccctgagagatcccagagtttcctttccctcttggccacattctggtgtcagtgacaaggaataccttcgctttgccacccgtcaaggttgaagaaacagcgtctccaacagagctccttgtgttatctgtttgtacatgtgcatttgtacagtaatttgtgtgacagtgttctttgtgtgaattacaggcaagaactgtggctgagcaaggcacatagtctactcagtctattcctaactcctccttttggtgttggatttgtaaggcactttatcccttttgtctcatgtttcatcgtaaatggcataggcagagatgatatctaattctgcatttgattgtcactttttgtacctgcattaatttaataaaatatccttatttattttgttacttggtacaccagcatgtccattttcttgtttattttgtgtttcataaaatgcttagtttaa

SEQ ID NO: 1039 - RNA, 3653 nt, Mus musculus
  modified_base 5: mod_base = OTHER; note = thymine
  modified_base 8: mod_base = OTHER; note = thymine
  modified_base 11: mod_base = OTHER; note = thymine
  modified_base 21: mod_base = OTHER; note = thymine
  modified_base 24: mod_base = OTHER; note = thymine
  modified_base 32: mod_base = OTHER; note = thymine
  modified_base 37..38: mod_base = OTHER; note = thymine
  modified_base 44: mod_base = OTHER; note = thymine
  modified_base 55: mod_base = OTHER; note = thymine
  modified_base 57: mod_base = OTHER; note = thymine
  modified_base 60: mod_base = OTHER; note = thymine
  modified_base 65: mod_base = OTHER; note = thymine
  modified_base 71: mod_base = OTHER; note = thymine
  modified_base 74..75: mod_base = OTHER; note = thymine
  modified_base 85: mod_base = OTHER; note = thymine
  modified_base 91: mod_base = OTHER; note = thymine
  modified_base 93..95: mod_base = OTHER; note = thymine
  modified_base 98: mod_base = OTHER; note = thymine
  modified_base 103..104: mod_base = OTHER; note = thymine
  modified_base 106: mod_base = OTHER; note = thymine
  modified_base 108..109: mod_base = OTHER; note = thymine
  modified_base 117: mod_base = OTHER; note = thymine
  modified_base 120: mod_base = OTHER; note = thymine
  modified_base 122: mod_base = OTHER; note = thymine
  modified_base 126..127: mod_base = OTHER; note = thymine
  modified_base 130: mod_base = OTHER; note = thymine
  modified_base 138..140: mod_base = OTHER; note = thymine
  modified_base 143: mod_base = OTHER; note = thymine
  modified_base 145: mod_base = OTHER; note = thymine
  modified_base 152: mod_base = OTHER; note = thymine
  modified_base 162..163: mod_base = OTHER; note = thymine
  modified_base 165: mod_base = OTHER; note = thymine
  modified_base 169: mod_base = OTHER; note = thymine
  modified_base 172: mod_base = OTHER; note = thymine
  modified_base 177: mod_base = OTHER; note = thymine
  modified_base 179: mod_base = OTHER; note = thymine
  modified_base 190: mod_base = OTHER; note = thymine
  modified_base 196: mod_base = OTHER; note = thymine
  modified_base 201: mod_base = OTHER; note = thymine
  modified_base 207..208: mod_base = OTHER; note = thymine
  modified_base 212: mod_base = OTHER; note = thymine
  modified_base 214: mod_base = OTHER; note = thymine
  modified_base 226: mod_base = OTHER; note = thymine
  modified_base 232: mod_base = OTHER; note = thymine
  modified_base 235..236: mod_base = OTHER; note = thymine
  modified_base 240..241: mod_base = OTHER; note = thymine
  modified_base 244: mod_base = OTHER; note = thymine
  modified_base 247: mod_base = OTHER; note = thymine
  modified_base 249: mod_base = OTHER; note = thymine
  modified_base 252: mod_base = OTHER; note = thymine
  modified_base 266: mod_base = OTHER; note = thymine
  modified_base 274: mod_base = OTHER; note = thymine
  modified_base 277..278: mod_base = OTHER; note = thymine
  modified_base 282..284: mod_base = OTHER; note = thymine
  modified_base 286: mod_base = OTHER; note = thymine
  modified_base 304..305: mod_base = OTHER; note = thymine
  modified_base 311: mod_base = OTHER; note = thymine
  modified_base 324..325: mod_base = OTHER; note = thymine
  modified_base 339: mod_base = OTHER; note = thymine
  modified_base 343: mod_base = OTHER; note = thymine
  modified_base 358..361: mod_base = OTHER; note = thymine
  modified_base 371: mod_base = OTHER; note = thymine
  modified_base 374: mod_base = OTHER; note = thymine
  modified_base 379..380: mod_base = OTHER; note = thymine
  modified_base 385: mod_base = OTHER; note = thymine
  modified_base 394: mod_base = OTHER; note = thymine
  modified_base 400: mod_base = OTHER; note = thymine
  modified_base 415..417: mod_base = OTHER; note = thymine
  modified_base 420: mod_base = OTHER; note = thymine
  modified_base 423: mod_base = OTHER; note = thymine
  modified_base 427: mod_base = OTHER; note = thymine
  modified_base 430: mod_base = OTHER; note = thymine
  modified_base 435: mod_base = OTHER; note = thymine
  modified_base 440: mod_base = OTHER; note = thymine
  modified_base 443: mod_base = OTHER; note = thymine
  modified_base 450: mod_base = OTHER; note = thymine
  modified_base 460: mod_base = OTHER; note = thymine
  modified_base 466: mod_base = OTHER; note = thymine
  modified_base 472: mod_base = OTHER; note = thymine
  modified_base 476: mod_base = OTHER; note = thymine
  modified_base 483: mod_base = OTHER; note = thymine
  modified_base 493: mod_base = OTHER; note = thymine
  modified_base 505..507: mod_base = OTHER; note = thymine
  modified_base 511: mod_base = OTHER; note = thymine
  modified_base 515: mod_base = OTHER; note = thymine
  modified_base 524..525: mod_base = OTHER; note = thymine
  modified_base 527: mod_base = OTHER; note = thymine
  modified_base 533: mod_base = OTHER; note = thymine
  modified_base 538: mod_base = OTHER; note = thymine
  modified_base 541: mod_base = OTHER; note = thymine
  modified_base 543: mod_base = OTHER; note = thymine
  modified_base 545: mod_base = OTHER; note = thymine
  modified_base 557..558: mod_base = OTHER; note = thymine
  modified_base 560: mod_base = OTHER; note = thymine
  modified_base 569: mod_base = OTHER; note = thymine
  modified_base 574: mod_base = OTHER; note = thymine
  modified_base 577: mod_base = OTHER; note = thymine
  modified_base 579: mod_base = OTHER; note = thymine
  modified_base 590: mod_base = OTHER; note = thymine
  modified_base 604: mod_base = OTHER; note = thymine
  modified_base 608: mod_base = OTHER; note = thymine
  modified_base 620: mod_base = OTHER; note = thymine
  modified_base 622: mod_base = OTHER; note = thymine
  modified_base 629..630: mod_base = OTHER; note = thymine
  modified_base 646: mod_base = OTHER; note = thymine
  modified_base 649..650: mod_base = OTHER; note = thymine
  modified_base 652: mod_base = OTHER; note = thymine
  modified_base 656: mod_base = OTHER; note = thymine
  modified_base 658: mod_base = OTHER; note = thymine
  modified_base 668: mod_base = OTHER; note = thymine
  modified_base 670: mod_base = OTHER; note = thymine
  modified_base 676: mod_base = OTHER; note = thymine
  modified_base 692: mod_base = OTHER; note = thymine
  modified_base 695: mod_base = OTHER; note = thymine
  modified_base 697..700: mod_base = OTHER; note = thymine
  modified_base 702: mod_base = OTHER; note = thymine
  modified_base 705: mod_base = OTHER; note = thymine
  modified_base 707: mod_base = OTHER; note = thymine
  modified_base 711..714: mod_base = OTHER; note = thymine
  modified_base 720: mod_base = OTHER; note = thymine
  modified_base 751: mod_base = OTHER; note = thymine
  modified_base 754: mod_base = OTHER; note = thymine
  modified_base 757: mod_base = OTHER; note = thymine
  modified_base 766: mod_base = OTHER; note = thymine
  modified_base 770: mod_base = OTHER; note = thymine
  modified_base 779: mod_base = OTHER; note = thymine
  modified_base 782: mod_base = OTHER; note = thymine
  modified_base 797: mod_base = OTHER; note = thymine
  modified_base 801: mod_base = OTHER; note = thymine
  modified_base 805: mod_base = OTHER; note = thymine
  modified_base 808..809: mod_base = OTHER; note = thymine
  modified_base 811: mod_base = OTHER; note = thymine
  modified_base 816: mod_base = OTHER; note = thymine
  modified_base 820: mod_base = OTHER; note = thymine
  modified_base 823: mod_base = OTHER; note = thymine
  modified_base 825..826: mod_base = OTHER; note = thymine
  modified_base 828..829: mod_base = OTHER; note = thymine
  modified_base 832: mod_base = OTHER; note = thymine
  modified_base 835..836: mod_base = OTHER; note = thymine
  modified_base 838: mod_base = OTHER; note = thymine
  modified_base 841: mod_base = OTHER; note = thymine
  modified_base 843: mod_base = OTHER; note = thymine
  modified_base 850: mod_base = OTHER; note = thymine
  modified_base 853: mod_base = OTHER; note = thymine
  modified_base 856: mod_base = OTHER; note = thymine
  modified_base 858..859: mod_base = OTHER; note = thymine
  modified_base 861..862: mod_base = OTHER; note = thymine
  modified_base 874: mod_base = OTHER; note = thymine
  modified_base 880: mod_base = OTHER; note = thymine
  modified_base 883: mod_base = OTHER; note = thymine
  modified_base 887: mod_base = OTHER; note = thymine
  modified_base 889: mod_base = OTHER; note = thymine
  modified_base 897: mod_base = OTHER; note = thymine
  modified_base 899: mod_base = OTHER; note = thymine
  modified_base 904..905: mod_base = OTHER; note = thymine
  modified_base 911: mod_base = OTHER; note = thymine
  modified_base 918: mod_base = OTHER; note = thymine
  modified_base 932: mod_base = OTHER; note = thymine
  modified_base 935: mod_base = OTHER; note = thymine
  modified_base 942..943: mod_base = OTHER; note = thymine
  modified_base 954: mod_base = OTHER; note = thymine
  modified_base 961: mod_base = OTHER; note = thymine
  modified_base 963..964: mod_base = OTHER; note = thymine
  modified_base 971: mod_base = OTHER; note = thymine
  modified_base 973: mod_base = OTHER; note = thymine
  modified_base 976: mod_base = OTHER; note = thymine
  modified_base 979: mod_base = OTHER; note = thymine
  modified_base 983..984: mod_base = OTHER; note = thymine
  modified_base 991..992: mod_base = OTHER; note = thymine
  modified_base 994: mod_base = OTHER; note = thymine
  modified_base 997: mod_base = OTHER; note = thymine
  modified_base 999: mod_base = OTHER; note = thymine
  modified_base 1001: mod_base = OTHER; note = thymine
  modified_base 1017: mod_base = OTHER; note = thymine
  modified_base 1024: mod_base = OTHER; note = thymine
  modified_base 1028: mod_base = OTHER; note = thymine
  modified_base 1037: mod_base = OTHER; note = thymine
  modified_base 1043: mod_base = OTHER; note = thymine
  modified_base 1050: mod_base = OTHER; note = thymine
  modified_base 1071: mod_base = OTHER; note = thymine
  modified_base 1073..1074: mod_base = OTHER; note = thymine
  modified_base 1087: mod_base = OTHER; note = thymine
  modified_base 1101..1106: mod_base = OTHER; note = thymine
  modified_base 1119: mod_base = OTHER; note = thymine
  modified_base 1122: mod_base = OTHER; note = thymine
  modified_base 1130..1131: mod_base = OTHER; note = thymine
  modified_base 1137: mod_base = OTHER; note = thymine
  modified_base 1141: mod_base = OTHER; note = thymine
  modified_base 1144: mod_base = OTHER; note = thymine
  modified_base 1146..1147: mod_base = OTHER; note = thymine
  modified_base 1154: mod_base = OTHER; note = thymine
  modified_base 1158..1159: mod_base = OTHER; note = thymine
  modified_base 1165..1166: mod_base = OTHER; note = thymine
  modified_base 1169: mod_base = OTHER; note = thymine
  modified_base 1173..1174: mod_base = OTHER; note = thymine
  modified_base 1181: mod_base = OTHER; note = thymine
  modified_base 1184: mod_base = OTHER; note = thymine
  modified_base 1187..1188: mod_base = OTHER; note = thymine
  modified_base 1195: mod_base = OTHER; note = thymine
  modified_base 1200..1203: mod_base = OTHER; note = thymine
  modified_base 1206: mod_base = OTHER; note = thymine
  modified_base 1208: mod_base = OTHER; note = thymine
  modified_base 1211: mod_base = OTHER; note = thymine
  modified_base 1215: mod_base = OTHER; note = thymine
  modified_base 1223: mod_base = OTHER; note = thymine
  modified_base 1230: mod_base = OTHER; note = thymine
  modified_base 1235: mod_base = OTHER; note = thymine
  modified_base 1238: mod_base = OTHER; note = thymine
  modified_base 1242: mod_base = OTHER; note = thymine
  modified_base 1244..1245: mod_base = OTHER; note = thymine
  modified_base 1252: mod_base = OTHER; note = thymine
  modified_base 1256: mod_base = OTHER; note = thymine
  modified_base 1260..1261: mod_base = OTHER; note = thymine
  modified_base 1263: mod_base = OTHER; note = thymine
  modified_base 1265..1267: mod_base = OTHER; note = thymine
  modified_base 1269..1272: mod_base = OTHER; note = thymine
  modified_base 1276: mod_base = OTHER; note = thymine
  modified_base 1278: mod_base = OTHER; note = thymine
  modified_base 1280: mod_base = OTHER; note = thymine
  modified_base 1282: mod_base = OTHER; note = thymine
  modified_base 1284..1285: mod_base = OTHER; note = thymine
  modified_base 1287: mod_base = OTHER; note = thymine
  modified_base 1291..1293: mod_base = OTHER; note = thymine
  modified_base 1299: mod_base = OTHER; note = thymine
  modified_base 1301: mod_base = OTHER; note = thymine
  modified_base 1304..1305: mod_base = OTHER; note = thymine
  modified_base 1307: mod_base = OTHER; note = thymine
  modified_base 1311: mod_base = OTHER; note = thymine
  modified_base 1314: mod_base = OTHER; note = thymine
  modified_base 1318..1319: mod_base = OTHER; note = thymine
  modified_base 1321: mod_base = OTHER; note = thymine
  modified_base 1329: mod_base = OTHER; note = thymine
  modified_base 1332: mod_base = OTHER; note = thymine
  modified_base 1336: mod_base = OTHER; note = thymine
  modified_base 1338..1339: mod_base = OTHER; note = thymine
  modified_base 1344: mod_base = OTHER; note = thymine
  modified_base 1346: mod_base = OTHER; note = thymine
  modified_base 1349: mod_base = OTHER; note = thymine
  modified_base 1358: mod_base = OTHER; note = thymine
  modified_base 1363: mod_base = OTHER; note = thymine
  modified_base 1366: mod_base = OTHER; note = thymine
  modified_base 1369..1370: mod_base = OTHER; note = thymine
  modified_base 1375: mod_base = OTHER; note = thymine
  modified_base 1378: mod_base = OTHER; note = thymine
  modified_base 1382: mod_base = OTHER; note = thymine
  modified_base 1386: mod_base = OTHER; note = thymine
  modified_base 1389: mod_base = OTHER; note = thymine
  modified_base 1392: mod_base = OTHER; note = thymine
  modified_base 1413: mod_base = OTHER; note = thymine
  modified_base 1418: mod_base = OTHER; note = thymine
  modified_base 1421..1422: mod_base = OTHER; note = thymine
  modified_base 1425..1427: mod_base = OTHER; note = thymine
  modified_base 1435: mod_base = OTHER; note = thymine
  modified_base 1437..1438: mod_base = OTHER; note = thymine
  modified_base 1441: mod_base = OTHER; note = thymine
  modified_base 1443: mod_base = OTHER; note = thymine
  modified_base 1445: mod_base = OTHER; note = thymine
  modified_base 1449: mod_base = OTHER; note = thymine
  modified_base 1454: mod_base = OTHER; note = thymine
  modified_base 1457: mod_base = OTHER; note = thymine
  modified_base 1459..1461: mod_base = OTHER; note = thymine
  modified_base 1463..1467: mod_base = OTHER; note = thymine
  modified_base 1471: mod_base = OTHER; note = thymine
  modified_base 1474: mod_base = OTHER; note = thymine
  modified_base 1481: mod_base = OTHER; note = thymine
  modified_base 1483..1484: mod_base = OTHER; note = thymine
  modified_base 1488: mod_base = OTHER; note = thymine
  modified_base 1494..1495: mod_base = OTHER; note = thymine
  modified_base 1497..1498: mod_base = OTHER; note = thymine
  modified_base 1500: mod_base = OTHER; note = thymine
  modified_base 1502: mod_base = OTHER; note = thymine
  modified_base 1504: mod_base = OTHER; note = thymine
  modified_base 1510..1511: mod_base = OTHER; note = thymine
  modified_base 1513: mod_base = OTHER; note = thymine
  modified_base 1517: mod_base = OTHER; note = thymine
  modified_base 1519: mod_base = OTHER; note = thymine
  modified_base 1524: mod_base = OTHER; note = thymine
  modified_base 1526: mod_base = OTHER; note = thymine
  modified_base 1532: mod_base = OTHER; note = thymine
  modified_base 1538: mod_base = OTHER; note = thymine
  modified_base 1540: mod_base = OTHER; note = thymine
  modified_base 1543: mod_base = OTHER; note = thymine
  modified_base 1545: mod_base = OTHER; note = thymine
  modified_base 1548..1549: mod_base = OTHER; note = thymine
  modified_base 1554: mod_base = OTHER; note = thymine
  modified_base 1563: mod_base = OTHER; note = thymine
  modified_base 1566: mod_base = OTHER; note = thymine
  modified_base 1572: mod_base = OTHER; note = thymine
  modified_base 1582: mod_base = OTHER; note = thymine
  modified_base 1587: mod_base = OTHER; note = thymine
  modified_base 1589: mod_base = OTHER; note = thymine
  modified_base 1591..1592: mod_base = OTHER; note = thymine
  modified_base 1594: mod_base = OTHER; note = thymine
  modified_base 1597: mod_base = OTHER; note = thymine
  modified_base 1601..1602: mod_base = OTHER; note = thymine
  modified_base 1605: mod_base = OTHER; note = thymine
  modified_base 1617: mod_base = OTHER; note = thymine
  modified_base 1625: mod_base = OTHER; note = thymine
  modified_base 1629: mod_base = OTHER; note = thymine
  modified_base 1633..1634: mod_base = OTHER; note = thymine
  modified_base 1645: mod_base = OTHER; note = thymine
  modified_base 1647: mod_base = OTHER; note = thymine
  modified_base 1652: mod_base = OTHER; note = thymine
  modified_base 1654: mod_base = OTHER; note = thymine
  modified_base 1659..1661: mod_base = OTHER; note = thymine
  modified_base 1663: mod_base = OTHER; note = thymine
  modified_base 1665..1666: mod_base = OTHER; note = thymine
  modified_base 1668..1669: mod_base = OTHER; note = thymine
  modified_base 1677: mod_base = OTHER; note = thymine
  modified_base 1679: mod_base = OTHER; note = thymine
  modified_base 1682..1684: mod_base = OTHER; note = thymine
  modified_base 1690: mod_base = OTHER; note = thymine
  modified_base 1695..1697: mod_base = OTHER; note = thymine
  modified_base 1699: mod_base = OTHER; note = thymine
  modified_base 1702..1703: mod_base = OTHER; note = thymine
  modified_base 1710..1711: mod_base = OTHER; note = thymine
  modified_base 1714..1716: mod_base = OTHER; note = thymine
  modified_base 1723: mod_base = OTHER; note = thymine
  modified_base 1726..1727: mod_base = OTHER; note = thymine
  modified_base 1729..1730: mod_base = OTHER; note = thymine
  modified_base 1734: mod_base = OTHER; note = thymine
  modified_base 1739..1740: mod_base = OTHER; note = thymine
  modified_base 1742: mod_base = OTHER; note = thymine
  modified_base 1744: mod_base = OTHER; note = thymine
  modified_base 1746: mod_base = OTHER; note = thymine
  modified_base 1750: mod_base = OTHER; note = thymine
  modified_base 1758: mod_base = OTHER; note = thymine
  modified_base 1762..1763: mod_base = OTHER; note = thymine
  modified_base 1765: mod_base = OTHER; note = thymine
  modified_base 1770: mod_base = OTHER; note = thymine
  modified_base 1772: mod_base = OTHER; note = thymine
  modified_base 1775: mod_base = OTHER; note = thymine
  modified_base 1780: mod_base = OTHER; note = thymine
  modified_base 1782: mod_base = OTHER; note = thymine
  modified_base 1788: mod_base = OTHER; note = thymine
  modified_base 1794: mod_base = OTHER; note = thymine
  modified_base 1796: mod_base = OTHER; note = thymine
  modified_base 1806: mod_base = OTHER; note = thymine
  modified_base 1812: mod_base = OTHER; note = thymine
  modified_base 1819: mod_base = OTHER; note = thymine
  modified_base 1821..1823: mod_base = OTHER; note = thymine
  modified_base 1825: mod_base = OTHER; note = thymine
  modified_base 1827: mod_base = OTHER; note = thymine
  modified_base 1829: mod_base = OTHER; note = thymine
  modified_base 1831..1832: mod_base = OTHER; note = thymine
  modified_base 1836: mod_base = OTHER; note = thymine
  modified_base 1839: mod_base = OTHER; note = thymine
  modified_base 1848: mod_base = OTHER; note = thymine
  modified_base 1850..1851: mod_base = OTHER; note = thymine
  modified_base 1854..1855: mod_base = OTHER; note = thymine
  modified_base 1866..1867: mod_base = OTHER; note = thymine
  modified_base 1871..1874: mod_base = OTHER; note = thymine
  modified_base 1883: mod_base = OTHER; note = thymine
  modified_base 1890: mod_base = OTHER; note = thymine
  modified_base 1894: mod_base = OTHER; note = thymine
  modified_base 1899..1900: mod_base = OTHER; note = thymine
  modified_base 1903..1904: mod_base = OTHER; note = thymine
  modified_base 1906: mod_base = OTHER; note = thymine
  modified_base 1908: mod_base = OTHER; note = thymine
  modified_base 1913..1914: mod_base = OTHER; note = thymine
  modified_base 1918..1920: mod_base = OTHER; note = thymine
  modified_base 1924: mod_base = OTHER; note = thymine
  modified_base 1927..1929: mod_base = OTHER; note = thymine
  modified_base 1932: mod_base = OTHER; note = thymine
  modified_base 1934: mod_base = OTHER; note = thymine
  modified_base 1937..1938: mod_base = OTHER; note = thymine
  modified_base 1943: mod_base = OTHER; note = thymine
  modified_base 1948: mod_base = OTHER; note = thymine
  modified_base 1950: mod_base = OTHER; note = thymine
  modified_base 1952..1953: mod_base = OTHER; note = thymine
  modified_base 1955..1956: mod_base = OTHER; note = thymine
  modified_base 1958: mod_base = OTHER; note = thymine
  modified_base 1962: mod_base = OTHER; note = thymine
  modified_base 1967: mod_base = OTHER; note = thymine
  modified_base 1969: mod_base = OTHER; note = thymine
  modified_base 1972: mod_base = OTHER; note = thymine
  modified_base 1976: mod_base = OTHER; note = thymine
  modified_base 1978..1979: mod_base = OTHER; note = thymine
  modified_base 1981..1982: mod_base = OTHER; note = thymine
  modified_base 1986: mod_base = OTHER; note = thymine
  modified_base 1989..1990: mod_base = OTHER; note = thymine
  modified_base 1992..1995: mod_base = OTHER; note = thymine
  modified_base 1997..2002: mod_base = OTHER; note = thymine
  modified_base 2006: mod_base = OTHER; note = thymine
  modified_base 2008..2010: mod_base = OTHER; note = thymine
  modified_base 2012: mod_base = OTHER; note = thymine
  modified_base 2014..2016: mod_base = OTHER; note = thymine
  modified_base 2020: mod_base = OTHER; note = thymine
  modified_base 2023: mod_base = OTHER; note = thymine
  modified_base 2025..2026: mod_base = OTHER; note = thymine
  modified_base 2031: mod_base = OTHER; note = thymine
  modified_base 2033: mod_base = OTHER; note = thymine
  modified_base 2041: mod_base = OTHER; note = thymine
  modified_base 2045: mod_base = OTHER; note = thymine
  modified_base 2049..2050: mod_base = OTHER; note = thymine
  modified_base 2053: mod_base = OTHER; note = thymine
  modified_base 2061..2063: mod_base = OTHER; note = thymine
  modified_base 2066: mod_base = OTHER; note = thymine
  modified_base 2073: mod_base = OTHER; note = thymine
  modified_base 2075: mod_base = OTHER; note = thymine
  modified_base 2083: mod_base = OTHER; note = thymine
  modified_base 2087: mod_base = OTHER; note = thymine
  modified_base 2089..2090: mod_base = OTHER; note = thymine
  modified_base 2092: mod_base = OTHER; note = thymine
  modified_base 2096: mod_base = OTHER; note = thymine
  modified_base 2107: mod_base = OTHER; note = thymine
  modified_base 2117..2118: mod_base = OTHER; note = thymine
  modified_base 2122: mod_base = OTHER; note = thymine
  modified_base 2124: mod_base = OTHER; note = thymine
  modified_base 2126..2128: mod_base = OTHER; note = thymine
  modified_base 2130: mod_base = OTHER; note = thymine
  modified_base 2134: mod_base = OTHER; note = thymine
  modified_base 2137..2140: mod_base = OTHER; note = thymine
  modified_base 2143: mod_base = OTHER; note = thymine
  modified_base 2152: mod_base = OTHER; note = thymine
  modified_base 2174: mod_base = OTHER; note = thymine
  modified_base 2177: mod_base = OTHER; note = thymine
  modified_base 2182: mod_base = OTHER; note = thymine
  modified_base 2184: mod_base = OTHER; note = thymine
  modified_base 2187..2188: mod_base = OTHER; note = thymine
  modified_base 2201: mod_base = OTHER; note = thymine
  modified_base 2206: mod_base = OTHER; note = thymine
  modified_base 2210: mod_base = OTHER; note = thymine
  modified_base 2213..2214: mod_base = OTHER; note = thymine
  modified_base 2218: mod_base = OTHER; note = thymine
  modified_base 2226: mod_base = OTHER; note = thymine
  modified_base 2235: mod_base = OTHER; note = thymine
  modified_base 2245: mod_base = OTHER; note = thymine
  modified_base 2255: mod_base = OTHER; note = thymine
  modified_base 2259: mod_base = OTHER; note = thymine
  modified_base 2308: mod_base = OTHER; note = thymine
  modified_base 2310: mod_base = OTHER; note = thymine
  modified_base 2313: mod_base = OTHER; note = thymine
  modified_base 2316: mod_base = OTHER; note = thymine
  modified_base 2322: mod_base = OTHER; note = thymine
  modified_base 2326: mod_base = OTHER; note = thymine
  modified_base 2333: mod_base = OTHER; note = thymine
  modified_base 2336: mod_base = OTHER; note = thymine
  modified_base 2342: mod_base = OTHER; note = thymine
  modified_base 2352: mod_base = OTHER; note = thymine
  modified_base 2357..2358: mod_base = OTHER; note = thymine
  modified_base 2369: mod_base = OTHER; note = thymine
  modified_base 2380..2381: mod_base = OTHER; note = thymine
  modified_base 2383: mod_base = OTHER; note = thymine
  modified_base 2385: mod_base = OTHER; note = thymine
  modified_base 2391: mod_base = OTHER; note = thymine
  modified_base 2394: mod_base = OTHER; note = thymine
  modified_base 2431: mod_base = OTHER; note = thymine
  modified_base 2433: mod_base = OTHER; note = thymine
  modified_base 2435..2436: mod_base = OTHER; note = thymine
  modified_base 2440: mod_base = OTHER; note = thymine
  modified_base 2446: mod_base = OTHER; note = thymine
  modified_base 2448: mod_base = OTHER; note = thymine
  modified_base 2451: mod_base = OTHER; note = thymine
  modified_base 2453: mod_base = OTHER; note = thymine
  modified_base 2455: mod_base = OTHER; note = thymine
  modified_base 2458: mod_base = OTHER; note = thymine
  modified_base 2461..2462: mod_base = OTHER; note = thymine
  modified_base 2465: mod_base = OTHER; note = thymine
  modified_base 2475: mod_base = OTHER; note = thymine
  modified_base 2478: mod_base = OTHER; note = thymine
  modified_base 2480..2481: mod_base = OTHER; note = thymine
  modified_base 2483..2487: mod_base = OTHER; note = thymine
  modified_base 2489: mod_base = OTHER; note = thymine
  modified_base 2491: mod_base = OTHER; note = thymine
  modified_base 2493: mod_base = OTHER; note = thymine
  modified_base 2497..2499: mod_base = OTHER; note = thymine
  modified_base 2512..2513: mod_base = OTHER; note = thymine
  modified_base 2516: mod_base = OTHER; note = thymine
  modified_base 2518: mod_base = OTHER; note = thymine
  modified_base 2520: mod_base = OTHER; note = thymine
  modified_base 2525: mod_base = OTHER; note = thymine
  modified_base 2527: mod_base = OTHER; note = thymine
  modified_base 2529: mod_base = OTHER; note = thymine
  modified_base 2531..2532: mod_base = OTHER; note = thymine
  modified_base 2537: mod_base = OTHER; note = thymine
  modified_base 2539: mod_base = OTHER; note = thymine
  modified_base 2541: mod_base = OTHER; note = thymine
  modified_base 2543: mod_base = OTHER; note = thymine
  modified_base 2547: mod_base = OTHER; note = thymine
  modified_base 2549: mod_base = OTHER; note = thymine
  modified_base 2551: mod_base = OTHER; note = thymine
  modified_base 2553..2554: mod_base = OTHER; note = thymine
  modified_base 2556: mod_base = OTHER; note = thymine
  modified_base 2558: mod_base = OTHER; note = thymine
  modified_base 2560..2562: mod_base = OTHER; note = thymine
  modified_base 2564..2566: mod_base = OTHER; note = thymine
  modified_base 2568..2570: mod_base = OTHER; note = thymine
  modified_base 2572..2573: mod_base = OTHER; note = thymine
  modified_base 2576..2578: mod_base = OTHER; note = thymine
  modified_base 2580..2582: mod_base = OTHER; note = thymine
  modified_base 2584..2586: mod_base = OTHER; note = thymine
  modified_base 2588..2590: mod_base = OTHER; note = thymine
  modified_base 2592..2594: mod_base = OTHER; note = thymine
  modified_base 2596..2598: mod_base = OTHER; note = thymine
  modified_base 2600..2602: mod_base = OTHER; note = thymine
  modified_base 2604..2606: mod_base = OTHER; note = thymine
  modified_base 2608..2610: mod_base = OTHER; note = thymine
  modified_base 2612..2614: mod_base = OTHER; note = thymine
  modified_base 2616..2618: mod_base = OTHER; note = thymine
  modified_base 2620..2622: mod_base = OTHER; note = thymine
  modified_base 2624..2625: mod_base = OTHER; note = thymine
  modified_base 2628..2629: mod_base = OTHER; note = thymine
  modified_base 2632..2633: mod_base = OTHER; note = thymine
  modified_base 2636..2637: mod_base = OTHER; note = thymine
  modified_base 2640..2641: mod_base = OTHER; note = thymine
  modified_base 2644..2645: mod_base = OTHER; note = thymine
  modified_base 2648..2649: mod_base = OTHER; note = thymine
  modified_base 2652..2653: mod_base = OTHER; note = thymine
  modified_base 2656..2657: mod_base = OTHER; note = thymine
  modified_base 2660..2662: mod_base = OTHER; note = thymine
  modified_base 2664..2666: mod_base = OTHER; note = thymine
  modified_base 2668..2670: mod_base = OTHER; note = thymine
  modified_base 2672..2674: mod_base = OTHER; note = thymine
  modified_base 2676..2682: mod_base = OTHER; note = thymine
  modified_base 2684: mod_base = OTHER; note = thymine
  modified_base 2686: mod_base = OTHER; note = thymine
  modified_base 2688: mod_base = OTHER; note = thymine
  modified_base 2690: mod_base = OTHER; note = thymine
  modified_base 2692: mod_base = OTHER; note = thymine
  modified_base 2694: mod_base = OTHER; note = thymine
  modified_base 2698: mod_base = OTHER; note = thymine
  modified_base 2702: mod_base = OTHER; note = thymine
  modified_base 2705..2706: mod_base = OTHER; note = thymine
  modified_base 2709: mod_base = OTHER; note = thymine
  modified_base 2713: mod_base = OTHER; note = thymine
  modified_base 2715: mod_base = OTHER; note = thymine
  modified_base 2719..2722: mod_base = OTHER; note = thymine
  modified_base 2724: mod_base = OTHER; note = thymine
  modified_base 2726: mod_base = OTHER; note = thymine
  modified_base 2729: mod_base = OTHER; note = thymine
  modified_base 2731..2732: mod_base = OTHER; note = thymine
  modified_base 2738..2742: mod_base = OTHER; note = thymine
  modified_base 2744..2746: mod_base = OTHER; note = thymine
  modified_base 2749: mod_base = OTHER; note = thymine
  modified_base 2751: mod_base = OTHER; note = thymine
  modified_base 2753: mod_base = OTHER; note = thymine
  modified_base 2757: mod_base = OTHER; note = thymine
  modified_base 2759..2761: mod_base = OTHER; note = thymine
  modified_base 2763: mod_base = OTHER; note = thymine
  modified_base 2766: mod_base = OTHER; note = thymine
  modified_base 2769..2770: mod_base = OTHER; note = thymine
  modified_base 2777: mod_base = OTHER; note = thymine
  modified_base 2781: mod_base = OTHER; note = thymine
  modified_base 2783: mod_base = OTHER; note = thymine
  modified_base 2789: mod_base = OTHER; note = thymine
  modified_base 2791..2793: mod_base = OTHER; note = thymine
  modified_base 2795..2797: mod_base = OTHER; note = thymine
  modified_base 2799: mod_base = OTHER; note = thymine
  modified_base 2803..2806: mod_base = OTHER; note = thymine
  modified_base 2808: mod_base = OTHER; note = thymine
  modified_base 2815: mod_base = OTHER; note = thymine
  modified_base 2818..2819: mod_base = OTHER; note = thymine
  modified_base 2821: mod_base = OTHER; note = thymine
  modified_base 2827: mod_base = OTHER; note = thymine
  modified_base 2829: mod_base = OTHER; note = thymine
  modified_base 2831: mod_base = OTHER; note = thymine
  modified_base 2837: mod_base = OTHER; note = thymine
  modified_base 2839: mod_base = OTHER; note = thymine
  modified_base 2841: mod_base = OTHER; note = thymine
  modified_base 2855: mod_base = OTHER; note = thymine
  modified_base 2857: mod_base = OTHER; note = thymine
  modified_base 2859: mod_base = OTHER; note = thymine
  modified_base 2862: mod_base = OTHER; note = thymine
  modified_base 2866: mod_base = OTHER; note = thymine
  modified_base 2870: mod_base = OTHER; note = thymine
  modified_base 2872: mod_base = OTHER; note = thymine
  modified_base 2874: mod_base = OTHER; note = thymine
  modified_base 2883..2885: mod_base = OTHER; note = thymine
  modified_base 2887: mod_base = OTHER; note = thymine
  modified_base 2896: mod_base = OTHER; note = thymine
  modified_base 2899: mod_base = OTHER; note = thymine
  modified_base 2907..2909: mod_base = OTHER; note = thymine
  modified_base 2911: mod_base = OTHER; note = thymine
  modified_base 2913..2915: mod_base = OTHER; note = thymine
  modified_base 2919..2920: mod_base = OTHER; note = thymine
  modified_base 2922..2923: mod_base = OTHER; note = thymine
  modified_base 2925: mod_base = OTHER; note = thymine
  modified_base 2927: mod_base = OTHER; note = thymine
  modified_base 2929: mod_base = OTHER; note = thymine
  modified_base 2931: mod_base = OTHER; note = thymine
  modified_base 2934..2935: mod_base = OTHER; note = thymine
  modified_base 2948: mod_base = OTHER; note = thymine
  modified_base 2952: mod_base = OTHER; note = thymine
  modified_base 2961: mod_base = OTHER; note = thymine
  modified_base 2966: mod_base = OTHER; note = thymine
  modified_base 2970..2971: mod_base = OTHER; note = thymine
  modified_base 2979: mod_base = OTHER; note = thymine
  modified_base 2994..2995: mod_base = OTHER; note = thymine
  modified_base 2997..2999: mod_base = OTHER; note = thymine
  modified_base 3001: mod_base = OTHER; note = thymine
  modified_base 3003: mod_base = OTHER; note = thymine
  modified_base 3005: mod_base = OTHER; note = thymine
  modified_base 3009: mod_base = OTHER; note = thymine
  modified_base 3024: mod_base = OTHER; note = thymine
  modified_base 3032..3035: mod_base = OTHER; note = thymine
  modified_base 3038..3040: mod_base = OTHER; note = thymine
  modified_base 3042..3043: mod_base = OTHER; note = thymine
  modified_base 3046..3047: mod_base = OTHER; note = thymine
  modified_base 3051..3052: mod_base = OTHER; note = thymine
  modified_base 3054: mod_base = OTHER; note = thymine
  modified_base 3056: mod_base = OTHER; note = thymine
  modified_base 3071: mod_base = OTHER; note = thymine
  modified_base 3075..3076: mod_base = OTHER; note = thymine
  modified_base 3079: mod_base = OTHER; note = thymine
  modified_base 3082..3083: mod_base = OTHER; note = thymine
  modified_base 3089..3090: mod_base = OTHER; note = thymine
  modified_base 3092: mod_base = OTHER; note = thymine
  modified_base 3095..3097: mod_base = OTHER; note = thymine
  modified_base 3103: mod_base = OTHER; note = thymine
  modified_base 3105: mod_base = OTHER; note = thymine
  modified_base 3111..3112: mod_base = OTHER; note = thymine
  modified_base 3115: mod_base = OTHER; note = thymine
  modified_base 3118..3119: mod_base = OTHER; note = thymine
  modified_base 3123: mod_base = OTHER; note = thymine
  modified_base 3126: mod_base = OTHER; note = thymine
  modified_base 3130: mod_base = OTHER; note = thymine
  modified_base 3135: mod_base = OTHER; note = thymine
  modified_base 3148..3149: mod_base = OTHER; note = thymine
  modified_base 3153: mod_base = OTHER; note = thymine
  modified_base 3155: mod_base = OTHER; note = thymine
  modified_base 3157: mod_base = OTHER; note = thymine
  modified_base 3159: mod_base = OTHER; note = thymine
  modified_base 3166..3167: mod_base = OTHER; note = thymine
  modified_base 3174: mod_base = OTHER; note = thymine
  modified_base 3177: mod_base = OTHER; note = thymine
  modified_base 3181: mod_base = OTHER; note = thymine
  modified_base 3183: mod_base = OTHER; note = thymine
  modified_base 3186..3187: mod_base = OTHER; note = thymine
  modified_base 3200: mod_base = OTHER; note = thymine
  modified_base 3202: mod_base = OTHER; note = thymine
  modified_base 3207: mod_base = OTHER; note = thymine
  modified_base 3210: mod_base = OTHER; note = thymine
  modified_base 3212..3213: mod_base = OTHER; note = thymine
  modified_base 3217: mod_base = OTHER; note = thymine
  modified_base 3223: mod_base = OTHER; note = thymine
  modified_base 3225..3226: mod_base = OTHER; note = thymine
  modified_base 3232: mod_base = OTHER; note = thymine
  modified_base 3234: mod_base = OTHER; note = thymine
  modified_base 3236: mod_base = OTHER; note = thymine
  modified_base 3238..3239: mod_base = OTHER; note = thymine
  modified_base 3241: mod_base = OTHER; note = thymine
  modified_base 3243: mod_base = OTHER; note = thymine
  modified_base 3274..3276: mod_base = OTHER; note = thymine
  modified_base 3278..3279: mod_base = OTHER; note = thymine
  modified_base 3284..3287: mod_base = OTHER; note = thymine
  modified_base 3290..3291: mod_base = OTHER; note = thymine
  modified_base 3293..3294: mod_base = OTHER; note = thymine
  modified_base 3296: mod_base = OTHER; note = thymine
  modified_base 3298: mod_base = OTHER; note = thymine
  modified_base 3303: mod_base = OTHER; note = thymine
  modified_base 3305: mod_base = OTHER; note = thymine
  modified_base 3312: mod_base = OTHER; note = thymine
  modified_base 3325: mod_base = OTHER; note = thymine
  modified_base 3330: mod_base = OTHER; note = thymine
  modified_base 3334: mod_base = OTHER; note = thymine
  modified_base 3337: mod_base = OTHER; note = thymine
  modified_base 3342: mod_base = OTHER; note = thymine
  modified_base 3345: mod_base = OTHER; note = thymine
  modified_base 3347: mod_base = OTHER; note = thymine
  modified_base 3349: mod_base = OTHER; note = thymine
  modified_base 3367: mod_base = OTHER; note = thymine
  modified_base 3382: mod_base = OTHER; note = thymine
  modified_base 3392: mod_base = OTHER; note = thymine
  modified_base 3394: mod_base = OTHER; note = thymine
  modified_base 3396..3397: mod_base = OTHER; note = thymine
  modified_base 3401: mod_base = OTHER; note = thymine
  modified_base 3403..3404: mod_base = OTHER; note = thymine
  modified_base 3414..3415: mod_base = OTHER; note = thymine
  modified_base 3417..3418: mod_base = OTHER; note = thymine
  modified_base 3421: mod_base = OTHER; note = thymine
  modified_base 3425: mod_base = OTHER; note = thymine
  modified_base 3427: mod_base = OTHER; note = thymine
  modified_base 3430: mod_base = OTHER; note = thymine
  modified_base 3432..3433: mod_base = OTHER; note = thymine
  modified_base 3436: mod_base = OTHER; note = thymine
  modified_base 3438: mod_base = OTHER; note = thymine
  modified_base 3440..3441: mod_base = OTHER; note = thymine
  modified_base 3443..3445: mod_base = OTHER; note = thymine
  modified_base 3447: mod_base = OTHER; note = thymine
  modified_base 3449: mod_base = OTHER; note = thymine
  modified_base 3454..3456: mod_base = OTHER; note = thymine
  modified_base 3464: mod_base = OTHER; note = thymine
  modified_base 3466: mod_base = OTHER; note = thymine
  modified_base 3471..3472: mod_base = OTHER; note = thymine
  modified_base 3483..3484: mod_base = OTHER; note = thymine
  modified_base 3486: mod_base = OTHER; note = thymine
  modified_base 3488..3490: mod_base = OTHER; note = thymine
  modified_base 3492..3493: mod_base = OTHER; note = thymine
  modified_base 3496..3499: mod_base = OTHER; note = thymine
  modified_base 3501..3503: mod_base = OTHER; note = thymine
  modified_base 3508: mod_base = OTHER; note = thymine
  modified_base 3510..3511: mod_base = OTHER; note = thymine
  modified_base 3514: mod_base = OTHER; note = thymine
  modified_base 3519: mod_base = OTHER; note = thymine
  modified_base 3521: mod_base = OTHER; note = thymine
  modified_base 3524: mod_base = OTHER; note = thymine
  modified_base 3527: mod_base = OTHER; note = thymine
  modified_base 3529..3530: mod_base = OTHER; note = thymine
  modified_base 3534..3535: mod_base = OTHER; note = thymine
  modified_base 3538: mod_base = OTHER; note = thymine
  modified_base 3540: mod_base = OTHER; note = thymine
  modified_base 3546..3548: mod_base = OTHER; note = thymine
  modified_base 3550..3551: mod_base = OTHER; note = thymine
  modified_base 3553..3556: mod_base = OTHER; note = thymine
  modified_base 3558: mod_base = OTHER; note = thymine
  modified_base 3560..3561: mod_base = OTHER; note = thymine
  modified_base 3563: mod_base = OTHER; note = thymine
  modified_base 3565: mod_base = OTHER; note = thymine
  modified_base 3567: mod_base = OTHER; note = thymine
  modified_base 3573: mod_base = OTHER; note = thymine
  modified_base 3577..3580: mod_base = OTHER; note = thymine
  modified_base 3582..3585: mod_base = OTHER; note = thymine
  modified_base 3589: mod_base = OTHER; note = thymine
  modified_base 3594..3595: mod_base = OTHER; note = thymine
  modified_base 3597: mod_base = OTHER; note = thymine
  modified_base 3601: mod_base = OTHER; note = thymine
  modified_base 3603: mod_base = OTHER; note = thymine
  modified_base 3605..3606: mod_base = OTHER; note = thymine
  modified_base 3610..3611: mod_base = OTHER; note = thymine
  modified_base 3614..3616: mod_base = OTHER; note = thymine
  modified_base 3619: mod_base = OTHER; note = thymine
  modified_base 3623: mod_base = OTHER; note = thymine
  modified_base 3625..3629: mod_base = OTHER; note = thymine
  modified_base 3631..3633: mod_base = OTHER; note = thymine
  modified_base 3635..3636: mod_base = OTHER; note = thymine
  misc_feature 1..3653: note = Mus Musculus CD274 mRNA
  source 1..3653: mol_type = mRNA
gaaatcgtggtccccaagcctcatgccaggctgcacttgcacgtcgcgggccagtctcctcgcctgcagatagttcccaaaacatgaggatatttgctggcattatattcacagcctgctgtcacttgctacgggcgtttactatcacggctccaaaggacttgtacgtggtggagtatggcagcaacgtcacgatggagtgcagattccctgtagaacgggagctggacctgcttgcgttagtggtgtactgggaaaaggaagatgagcaagtgattcagtttgtggcaggagaggaggaccttaagcctcagcacagcaacttcagggggagagcctcgctgccaaaggaccagcttttgaagggaaatgctgcccttcagatcacagacgtcaagctgcaggacgcaggcgtttactgctgcataatcagctacggtggtgcggactacaagcgaatcacgctgaaagtcaatgccccataccgcaaaatcaaccagagaatttccgtggatccagccacttctgagcatgaactaatatgtcaggccgagggttatccagaagctgaggtaatctggacaaacagtgaccaccaacccgtgagtgggaagagaagtgtcaccacttcccggacagaggggatgcttctcaatgtgaccagcagtctgagggtcaacgccacagcgaatgatgttttctactgtacgttttggagatcacagccagggcaaaaccacacagcggagctgatcatcccagaactgcctgcaacacatcctccacagaacaggactcactgggtgcttctgggatccatcctgttgttcctcattgtagtgtccacggtcctcctcttcttgagaaaacaagtgagaatgctagatgtggagaaatgtggcgttgaagatacaagctcaaaaaaccgaaatgatacacaattcgaggagacgtaagcagtgttgaaccctctgatcgtcgattggcagcttgtggtctgtgaaagaaagggcccatgggacatgagtccaaagactcaagatggaacctgagggagagaaccaagaaagtgttgggagaggagcctggaacaacggacattttttccagggagacactgctaagcaagttgcccatcagtcgtcttgggaaatggattgagggttcctggcttagcagctggtccttgcacagtgaccttttcctctgctcagtgccgggatgagagatggagtcatgagtgttgaagaataagtgccttctatttattttgagtctgtgtgttctcactttgggcatgtaattatgactggtgaattctgacgacatgatagatcttaagatgtagtcaccaaactcaactgctgcttagcatcctccgtaactactgatacaagcagggaacacagaggtcacctgcttggtttgacaggctcttgctgtctgactcaaataatctttatttttcagtcctcaaggctcttcgatagcagttgttctgtatcagccttataggtgtcaggtatagcactcaacatctcatctcattacaatagcaaccctcatcaccatagcaacagctaacctctgttatcctcacttcatagccaggaagctgagcgactaagtcacttgcccacagagtatcagctctcagatttctgttcttcagccactgtcctttcaggatagaatttgtcgttaagaaattaatttaaaaactgattattgagtagcattgtatatcaatcacaacatgccttgtgcactgtgctggcctctgagcataaagatgtacgccggagtaccggtcggacatgtttatgtgtgttaaatactcagagaaatgttcattaacaaggagcttgcattttagagacactggaaagtaactccagttcattgtctagcattacatttacctcatttgctatccttgccatacagtctcttgttctccatgaagtgtcatgaatcttgttgaatagttcttttattttttaaatgtttctatttaaatgatattgacatctgaggcgatagctcagttggtaaaaccctttcctcacaagtgtgaaaccctgagtcttatccctagaacccacataaaaaacagttgcgtatgtttgtgcatgcttttgatcccagcactagggaggcagaggcaggcagatcctgagctctcattgaccacccagcctagcctacatggttagctccaggcctacaggagctggcagagcctgaaaaacgatgcctagacacacacacacacacacacacacacacacacacacacacacaccatgtactcatagacctaagtgcaccctcctacacatgcacacacatacaattcaaacacaaatcaacagggaattgtctcagaatggtccccaagacaaagaagaagaaaaacaccaaaccagctctattccctcagcctatcctctctactccttcctagaagcaactactattgtttttgtatataaatttacccaacgacagttaatatgtagaatatatattaaagtgtctgtcaatatatattatctctttctttctttcttcctttctttctttctttctttctttctttctttctttctttctttctttcttccttccttccttccttccttccttccttccttcctttctttctttctttctttttttctgtctatctgtacctaaatggttgctcactatgcattttctgtgctcttcgccctttttatttaatgtatggatatttatgctgcttccagaatggatctaaagctctttgtttctaggttttctcccccatccttctaggcatctctcacactgtctaggccagacaccatgtctgctgcctgaatctgtagacaccatttataaagcacgtactcaccgagtttgtatttggcttgttctgtgtctgattaaagggagaccatgagtccccagggtacactgagttaccccagtaccaagggggagccttgtttgtgtctccatggcagaagcaggcctggagccattttggtttcttccttgacttctctcaaacacagacgcctcacttgctcattacaggttctcctttgggaatgtcagcattgctccttgactgctggctgccctggaaggagcccattagctctgtgtgagcccttgacagctactgcctctccttaccacaggggcctctaagatactgttacctagaggtcttgaggatctgtgttctctggggggaggaaaggaggaggaacccagaactttcttacagttttccttgttctgtcacatgtcaagactgaaggaacaggctgggctacgtagtgagatcctgtctcaaaggaaagacgagcatagccgaacccccggtggaaccccctctgttacctgttcacacaagcttattgatgagtctcatgttaatgtcttgtttgtatgaagtttaagaaaatatcgggttgggcaacacattctatttattcattttatttgaaatcttaatgccatctcatggtgttggattggtgtggcactttattcttttgtgttgtgtataaccataaattttattttgcatcagattgtcaatgtattgcattaatttaataaatatttttatttattaaaaaaaaaaaaaaaaa

SEQ ID NO: 1040 - RNA, 873 nt, Rattus norvegicus
  modified_base 2: mod_base = OTHER; note = thymine
  modified_base 8: mod_base = OTHER; note = thymine
  modified_base 10..12: mod_base = OTHER; note = thymine
  modified_base 15: mod_base = OTHER; note = thymine
  modified_base 17: mod_base = OTHER; note = thymine
  modified_base 20..21: mod_base = OTHER; note = thymine
  modified_base 23: mod_base = OTHER; note = thymine
  modified_base 26: mod_base = OTHER; note = thymine
  modified_base 34: mod_base = OTHER; note = thymine
  modified_base 39: mod_base = OTHER; note = thymine
  modified_base 44: mod_base = OTHER; note = thymine
  modified_base 47: mod_base = OTHER; note = thymine
  modified_base 55..57: mod_base = OTHER; note = thymine
  modified_base 62: mod_base = OTHER; note = thymine
  modified_base 69: mod_base = OTHER; note = thymine
  modified_base 80: mod_base = OTHER; note = thymine
  modified_base 82: mod_base = OTHER; note = thymine
  modified_base 86: mod_base = OTHER; note = thymine
  modified_base 89: mod_base = OTHER; note = thymine
  modified_base 94: mod_base = OTHER; note = thymine
  modified_base 96: mod_base = OTHER; note = thymine
  modified_base 105: mod_base = OTHER; note = thymine
  modified_base 107: mod_base = OTHER; note = thymine
  modified_base 113: mod_base = OTHER; note = thymine
  modified_base 118: mod_base = OTHER; note = thymine
  modified_base 124..125: mod_base = OTHER; note = thymine
  modified_base 131: mod_base = OTHER; note = thymine
  modified_base 142..143: mod_base = OTHER; note = thymine
  modified_base 149: mod_base = OTHER; note = thymine
  modified_base 152..153: mod_base = OTHER; note = thymine
  modified_base 157..158: mod_base = OTHER; note = thymine
  modified_base 161: mod_base = OTHER; note = thymine
  modified_base 164: mod_base = OTHER; note = thymine
  modified_base 166: mod_base = OTHER; note = thymine
  modified_base 169: mod_base = OTHER; note = thymine
  modified_base 191..192: mod_base = OTHER; note = thymine
  modified_base 194..195: mod_base = OTHER; note = thymine
  modified_base 199..201: mod_base = OTHER; note = thymine
  modified_base 203: mod_base = OTHER; note = thymine
  modified_base 221: mod_base = OTHER; note = thymine
  modified_base 228: mod_base = OTHER; note = thymine
  modified_base 241..242: mod_base = OTHER; note = thymine
  modified_base 256..257: mod_base = OTHER; note = thymine
  modified_base 259..260: mod_base = OTHER; note = thymine
  modified_base 275..278: mod_base = OTHER; note = thymine
  modified_base 293: mod_base = OTHER; note = thymine
  modified_base 296..297: mod_base = OTHER; note = thymine
  modified_base 302: mod_base = OTHER; note = thymine
  modified_base 309: mod_base = OTHER; note = thymine
  modified_base 311: mod_base = OTHER; note = thymine
  modified_base 317: mod_base = OTHER; note = thymine
  modified_base 330: mod_base = OTHER; note = thymine
  modified_base 332: mod_base = OTHER; note = thymine
  modified_base 334: mod_base = OTHER; note = thymine
  modified_base 337: mod_base = OTHER; note = thymine
  modified_base 340: mod_base = OTHER; note = thymine
  modified_base 344: mod_base = OTHER; note = thymine
  modified_base 347: mod_base = OTHER; note = thymine
  modified_base 352: mod_base = OTHER; note = thymine
  modified_base 354: mod_base = OTHER; note = thymine
  modified_base 357: mod_base = OTHER; note = thymine
  modified_base 367: mod_base = OTHER; note = thymine
  modified_base 377: mod_base = OTHER; note = thymine
  modified_base 382..383: mod_base = OTHER; note = thymine
  modified_base 389: mod_base = OTHER; note = thymine
  modified_base 396: mod_base = OTHER; note = thymine
  modified_base 400: mod_base = OTHER; note = thymine
  modified_base 410: mod_base = OTHER; note = thymine
  modified_base 422..424: mod_base = OTHER; note = thymine
  modified_base 428: mod_base = OTHER; note = thymine
  modified_base 432: mod_base = OTHER; note = thymine
  modified_base 441..442: mod_base = OTHER; note = thymine
  modified_base 444: mod_base = OTHER; note = thymine
  modified_base 450: mod_base = OTHER; note = thymine
  modified_base 455: mod_base = OTHER; note = thymine
  modified_base 458: mod_base = OTHER; note = thymine
  modified_base 460: mod_base = OTHER; note = thymine
  modified_base 468: mod_base = OTHER; note = thymine
  modified_base 474..475: mod_base = OTHER; note = thymine
  modified_base 491: mod_base = OTHER; note = thymine
  modified_base 494: mod_base = OTHER; note = thymine
  modified_base 496: mod_base = OTHER; note = thymine
  modified_base 507: mod_base = OTHER; note = thymine
  modified_base 517: mod_base = OTHER; note = thymine
  modified_base 521: mod_base = OTHER; note = thymine
  modified_base 525: mod_base = OTHER; note = thymine
  modified_base 537: mod_base = OTHER; note = thymine
  modified_base 539: mod_base = OTHER; note = thymine
  modified_base 546..547: mod_base = OTHER; note = thymine
  modified_base 555: mod_base = OTHER; note = thymine
  modified_base 566..567: mod_base = OTHER; note = thymine
  modified_base 569: mod_base = OTHER; note = thymine
  modified_base 575: mod_base = OTHER; note = thymine
  modified_base 584..585: mod_base = OTHER; note = thymine
  modified_base 587: mod_base = OTHER; note = thymine
  modified_base 593: mod_base = OTHER; note = thymine
  modified_base 606: mod_base = OTHER; note = thymine
  modified_base 609: mod_base = OTHER; note = thymine
  modified_base 612: mod_base = OTHER; note = thymine
  modified_base 614..617: mod_base = OTHER; note = thymine
  modified_base 622: mod_base = OTHER; note = thymine
  modified_base 624: mod_base = OTHER; note = thymine
  modified_base 628..629: mod_base = OTHER; note = thymine
  modified_base 631: mod_base = OTHER; note = thymine
  modified_base 638: mod_base = OTHER; note = thymine
  modified_base 643: mod_base = OTHER; note = thymine
  modified_base 663: mod_base = OTHER; note = thymine
  modified_base 668: mod_base = OTHER; note = thymine
  modified_base 671: mod_base = OTHER; note = thymine
  modified_base 674: mod_base = OTHER; note = thymine
  modified_base 683: mod_base = OTHER; note = thymine
  modified_base 687: mod_base = OTHER; note = thymine
  modified_base 689: mod_base = OTHER; note = thymine
  modified_base 696: mod_base = OTHER; note = thymine
  modified_base 698: mod_base = OTHER; note = thymine
  modified_base 705: mod_base = OTHER; note = thymine
  modified_base 718: mod_base = OTHER; note = thymine
  modified_base 722: mod_base = OTHER; note = thymine
  modified_base 725: mod_base = OTHER; note = thymine
  modified_base 728: mod_base = OTHER; note = thymine
  modified_base 733: mod_base = OTHER; note = thymine
  modified_base 737: mod_base = OTHER; note = thymine
  modified_base 740..743: mod_base = OTHER; note = thymine
  modified_base 745..746: mod_base = OTHER; note = thymine
  modified_base 749: mod_base = OTHER; note = thymine
  modified_base 752: mod_base = OTHER; note = thymine
  modified_base 755: mod_base = OTHER; note = thymine
  modified_base 760..761: mod_base = OTHER; note = thymine
  modified_base 767: mod_base = OTHER; note = thymine
  modified_base 769..770: mod_base = OTHER; note = thymine
  modified_base 772..773: mod_base = OTHER; note = thymine
  modified_base 775: mod_base = OTHER; note = thymine
  modified_base 778..779: mod_base = OTHER; note = thymine
  modified_base 791: mod_base = OTHER; note = thymine
  modified_base 797: mod_base = OTHER; note = thymine
  modified_base 800: mod_base = OTHER; note = thymine
  modified_base 804: mod_base = OTHER; note = thymine
  modified_base 806: mod_base = OTHER; note = thymine
  modified_base 814: mod_base = OTHER; note = thymine
  modified_base 820..821: mod_base = OTHER; note = thymine
  modified_base 828: mod_base = OTHER; note = thymine
  modified_base 834..835: mod_base = OTHER; note = thymine
  modified_base 849: mod_base = OTHER; note = thymine
  modified_base 852: mod_base = OTHER; note = thymine
  modified_base 859..860: mod_base = OTHER; note = thymine
  modified_base 871: mod_base = OTHER; note = thymine
  misc_feature 1..873: note = Rattus norvegicus CD274 mRNA
  source 1..873: mol_type = mRNA
atgaggatatttgctgtccttatagtcacagcctgcagtcacgtgctagcggcatttaccatcacagctccaaaggacctgtacgtggtggagtatggcagcaatgtcacgatggaatgcagattcccagtagaacagaaattggacctgcttgccttagtggtgtactgggaaaaggaagacaaggaagttattcagtttgtggagggagaggaggacctgaagcctcaacacagcagcttcagggggagagccttcttgccaaaggaccagcttttgaaggggaacgcggtgcttcagatcacagatgtcaagctgcaggacgcaggtgtctactgctgcatgatcagctatggtggagcggactacaagcgaatcacattgaaagtcaacgctccataccgcaaaatcaaccaaagaatttccatggatccagccacttctgagcatgaactaatgtgccaggctgagggttacccagaagccgaagtgatctggacaaacagtgaccaccagtccctgagtggggaaacaactgtcaccacttcccagactgaggagaagcttctcaacgtgaccagcgttctgagggtcaacgcaacagctaatgatgttttccactgtacgttctggagagtacactcaggggagaaccacacggctgaactgatcatcccagaactgcctgtaccacgtctcccacataacaggacacactgggtactcctgggatccgtccttttgttcctcatcgtggggttcaccgtcttcttctgcttgagaaaacaagtgagaatgctagatgtggaaaaatgcggcttcgaagatagaaattcaaagaaccgaaatgatacacagttcgaggagacgtaa

SEQ ID NO: 1041 - RNA, 36 nt, synthetic construct
  misc_feature 1..36: note = Synthetic: GalXC-mCD274
  source 1..36: mol_type = other RNA
aggatagaatttgtcgttaagcagccgaaaggctgc

SEQ ID NO: 1042 - RNA, 22 nt, synthetic construct
  misc_feature 1..22: note = Synthetic: GalXC-mCD274
  source 1..22: mol_type = other RNA
ttaacgacaaattctatcctgg

SEQ ID NO: 1043 - RNA, 36 nt, synthetic construct
  misc_feature 1..36: note = Synthetic: GalXC-ALDH2- C18
  source 1..36: mol_type = other RNA
ggtggatgaaactcagtttagcagccgaaaggctgc

SEQ ID NO: 1044 - RNA, 22 nt, synthetic construct
  misc_feature 1..22: note = Synthetic: GalXC-ALDH2- C18
  source 1..22: mol_type = other RNA
taaactgagtttcatccaccgg

SEQ ID NO: 1045 - RNA, 36 nt, synthetic construct; identical to SEQ ID NO: 1043
  misc_feature 1..36: note = Synthetic: GalXC-ALDH2- C18
  modified_base 1: mod_base = OTHER; note = 2'-O-methyl nucleotide linked via phosphorothioate
  modified_base 2: mod_base = OTHER; note = 2'-O-methyl nucleotide
  modified_base 3: mod_base = OTHER; note = 2'-Fluoro nucleotide
  modified_base 4: mod_base = OTHER; note = 2'-O-methyl nucleotide
  modified_base 5: mod_base = OTHER; note = 2'-Fluoro nucleotide
  modified_base 6..7: mod_base = OTHER; note = 2'-O-methyl nucleotide
  modified_base 8: mod_base = OTHER; note = 2'-Fluoro nucleotide
  modified_base 9: mod_base = OTHER; note = 2'-O-methyl nucleotide
  modified_base 10: mod_base = OTHER; note = 2'-Fluoro nucleotide
  modified_base 11: mod_base = OTHER; note = 2'-O-methyl nucleotide
  modified_base 12..13: mod_base = OTHER; note = 2'-Fluoro nucleotide
  modified_base 14: mod_base = OTHER; note = 2'-O-methyl nucleotide
  modified_base 15: mod_base = OTHER; note = 2'-Fluoro nucleotide
  modified_base 16: mod_base = OTHER; note = 2'-O-methyl nucleotide
  modified_base 17: mod_base = OTHER; note = 2'-Fluoro nucleotide
  modified_base 18..27: mod_base = OTHER; note = 2'-O-methyl nucleotide
  modified_base 28: mod_base = OTHER; note = aminodiethoxymethanol-adenosine-C18
  modified_base 29..36: mod_base = OTHER; note = 2'-O-methyl nucleotide
  source 1..36: mol_type = other RNA

SEQ ID NO: 1046 - RNA, 22 nt, synthetic construct
  misc_feature 1..22: note = Synthetic: GalXC-ALDH2- C18
  modified_base 1: mod_base = OTHER; note = 4'-O-monomethylphosphonate-2'-O-methylmethyluridine
  modified_base 2: mod_base = OTHER; note = 2'-Fluoro nucleotide linked via phosphorothioate
  modified_base 3..5: mod_base = OTHER; note = 2'-Fluoro nucleotide
  modified_base 6: mod_base = OTHER; note = 2'-O-methyl nucleotide
  modified_base 7: mod_base = OTHER; note = 2'-Fluoro nucleotide
  modified_base 8..9: mod_base = OTHER; note = 2'-O-methyl nucleotide
  modified_base 10: mod_base = OTHER; note = 2'-Fluoro nucleotide
  modified_base 11..13: mod_base = OTHER; note = 2'-O-methyl nucleotide
  modified_base 14: mod_base = OTHER; note = 2'-Fluoro nucleotide
  modified_base 15: mod_base = OTHER; note = 2'-O-methyl nucleotide
  modified_base 16: mod_base = OTHER; note = 2'-Fluoro nucleotide
  modified_base 17..18: mod_base = OTHER; note = 2'-O-methyl nucleotide
  modified_base 19: mod_base = OTHER; note = 2'-Fluoro nucleotide
  modified_base 20..21: mod_base = OTHER; note = 2'-O-methyl nucleotide linked via phosphorothioate
  modified_base 22: mod_base = OTHER; note = 2'-O-methyl nucleotide
  source 1..22: mol_type = other RNA
taaactgagtttcatccaccgg

SEQ ID NO: 1047 - RNA, 36 nt, synthetic construct; identical to SEQ ID NO: 1043
  misc_feature 1..36: note = Synthetic: GalXC-ALDH2- C16
  modified_base 1: mod_base = OTHER; note = 2'-O-methyl nucleotide linked via phosphorothioate
  modified_base 2: mod_base = OTHER; note = 2'-O-methyl nucleotide
  modified_base 3: mod_base = OTHER; note = 2'-Fluoro nucleotide
  modified_base 4: mod_base = OTHER; note = 2'-O-methyl nucleotide
  modified_base 5: mod_base = OTHER; note = 2'-Fluoro nucleotide
  modified_base 6..7: mod_base = OTHER; note = 2'-O-methyl nucleotide
  modified_base 8: mod_base = OTHER; note = 2'-Fluoro nucleotide
  modified_base 9: mod_base = OTHER; note = 2'-O-methyl nucleotide
  modified_base 10: mod_base = OTHER; note = 2'-Fluoro nucleotide
  modified_base 11: mod_base = OTHER; note = 2'-O-methyl nucleotide
  modified_base 12..13: mod_base = OTHER; note = 2'-Fluoro nucleotide
  modified_base 14: mod_base = OTHER; note = 2'-O-methyl nucleotide
  modified_base 15: mod_base = OTHER; note = 2'-Fluoro nucleotide
  modified_base 16: mod_base = OTHER; note = 2'-O-methyl nucleotide
  modified_base 17: mod_base = OTHER; note = 2'-Fluoro nucleotide
  modified_base 18..27: mod_base = OTHER; note = 2'-O-methyl nucleotide
  modified_base 28: mod_base = OTHER; note = aminodiethoxymethanol-adenosine-C16
  modified_base 29..36: mod_base = OTHER; note = 2'-O-methyl nucleotide
  source 1..36: mol_type = other RNA

SEQ ID NO: 1048 - RNA, 36 nt, synthetic construct; identical to SEQ ID NO: 1043
  misc_feature 1..36: note = Synthetic: GalXC-ALDH2- C22
  modified_base 1: mod_base = OTHER; note = 2'-O-methyl nucleotide linked via phosphorothioate
  modified_base 2: mod_base = OTHER; note = 2'-O-methyl nucleotide
  modified_base 3: mod_base = OTHER; note = 2'-Fluoro nucleotide
  modified_base 4: mod_base = OTHER; note = 2'-O-methyl nucleotide
  modified_base 5: mod_base = OTHER; note = 2'-Fluoro nucleotide
  modified_base 6..7: mod_base = OTHER; note = 2'-O-methyl nucleotide
  modified_base 8: mod_base = OTHER; note = 2'-Fluoro nucleotide
  modified_base 9: mod_base = OTHER; note = 2'-O-methyl nucleotide
  modified_base 10: mod_base = OTHER; note = 2'-Fluoro nucleotide
  modified_base 11: mod_base = OTHER; note = 2'-O-methyl nucleotide
  modified_base 12..13: mod_base = OTHER; note = 2'-Fluoro nucleotide
  modified_base 14: mod_base = OTHER; note = 2'-O-methyl nucleotide
  modified_base 15: mod_base = OTHER; note = 2'-Fluoro nucleotide
  modified_base 16: mod_base = OTHER; note = 2'-O-methyl nucleotide
  modified_base 17: mod_base = OTHER; note = 2'-Fluoro nucleotide
  modified_base 18..27: mod_base = OTHER; note = 2'-O-methyl nucleotide
  modified_base 28: mod_base = OTHER; note = aminodiethoxymethanol-adenosine-C18
  modified_base 29..36: mod_base = OTHER; note = 2'-O-methyl nucleotide
  source 1..36: mol_type = other RNA

SEQ ID NO: 1049 - RNA, 36 nt, synthetic construct; identical to SEQ ID NO: 1043
  misc_feature 1..36: note = Synthetic: GalXC-ALDH2- C24
  modified_base 1: mod_base = OTHER; note = 2'-O-methyl nucleotide linked via phosphorothioate
  modified_base 2: mod_base = OTHER; note = 2'-O-methyl nucleotide
  modified_base 3: mod_base = OTHER; note = 2'-Fluoro nucleotide
  modified_base 4: mod_base = OTHER; note = 2'-O-methyl nucleotide
  modified_base 5: mod_base = OTHER; note = 2'-Fluoro nucleotide
  modified_base 6..7: mod_base = OTHER; note = 2'-O-methyl nucleotide
  modified_base 8: mod_base = OTHER; note = 2'-Fluoro nucleotide
  modified_base 9: mod_base = OTHER; note = 2'-O-methyl nucleotide
  modified_base 10: mod_base = OTHER; note = 2'-Fluoro nucleotide
  modified_base 11: mod_base = OTHER; note = 2'-O-methyl nucleotide
  modified_base 12..13: mod_base = OTHER; note = 2'-Fluoro nucleotide
  modified_base 14: mod_base = OTHER; note = 2'-O-methyl nucleotide
  modified_base 15: mod_base = OTHER; note = 2'-Fluoro nucleotide
  modified_base 16: mod_base = OTHER; note = 2'-O-methyl nucleotide
  modified_base 17: mod_base = OTHER; note = 2'-Fluoro nucleotide
  modified_base 18..27: mod_base = OTHER; note = 2'-O-methyl nucleotide
  modified_base 28: mod_base = OTHER; note = aminodiethoxymethanol-adenosine-C18
  modified_base 29..36: mod_base = OTHER; note = 2'-O-methyl nucleotide
  source 1..36: mol_type = other RNA

SEQ ID NO: 1050 - RNA, 36 nt, synthetic construct; identical to SEQ ID NO: 487
  misc_feature 1..36: note = Synthetic: CD274-0098
  modified_base 1: mod_base = OTHER; note = aminodiethoxymethanol-guanosine linked via phosphorothioate C18
  modified_base 2..7: mod_base = OTHER; note = 2'-O-methyl nucleotide
  modified_base 8..11: mod_base = OTHER; note = 2'-Fluoro nucleotide
  modified_base 12..36: mod_base = OTHER; note = 2'-O-methyl nucleotide
  source 1..36: mol_type = other RNA

1.-68. (canceled)

69. An oligonucleotide for reducing CD274 expression, the oligonucleotide comprising an antisense strand of 15 to 30 nucleotides in length and a sense strand of 15 to 40 nucleotides in length, wherein the sense and antisense strand form a duplex region, wherein the antisense strand has a region of complementarity to a target sequence of CD274 as set forth in SEQ ID NO: 5, wherein the sense strand comprises at least one lipid moiety conjugated to the 5′ terminal nucleotide of the sense strand.

70. The oligonucleotide of claim 69, wherein the antisense strand comprises a sequence as set forth in SEQ ID NO: 728.

71. The oligonucleotide of claim 69, wherein the sense strand comprises a sequence as set forth in SEQ ID NO: 487.

72. The oligonucleotide of claim 69, wherein the lipid moiety is a saturated fatty acid moiety that ranges in size from C8 to C30 in length.

73. The oligonucleotide of claim 72, wherein the lipid moiety is a C18 saturated fatty acid moiety.

74. The oligonucleotide of claim 69, wherein the lipid moiety is conjugated to the 2′ carbon of the ribose ring of the 5′ terminal nucleotide.

75. The oligonucleotide of claim 69, wherein the sense strand comprises the sequence set forth in SEQ ID NO: 1050.

76. The oligonucleotide of claim 69, wherein the antisense strand comprises the sequence set forth in SEQ ID NO: 1005.

77. The oligonucleotide of claim 69, wherein the sense strand comprises the sequence set forth in SEQ ID NO: 1050, and wherein the antisense strand comprises the sequence set forth in SEQ ID NO: 1005.

78. An oligonucleotide for reducing CD274 expression, wherein the oligonucleotide comprises a sense strand comprising the sequence set forth in SEQ ID NO: 1050 and the antisense strand comprises the sequence set forth in SEQ ID NO: 1005, wherein the sense strand and antisense strand form an asymmetric duplex region of 20 nucleotides in length and having an overhang of 2 nucleotides at the 3′ terminus of the antisense strand.

79. The oligonucleotide of claim 69, wherein the oligonucleotide reduces expression of CD274 mRNA in one or more immune cells associated with a tumor microenvironment.

80. A pharmaceutical composition comprising the oligonucleotide of claim 69, and a pharmaceutically acceptable carrier, delivery agent, or excipient.

81. The oligonucleotide of claim 78, wherein the oligonucleotide reduces expression of CD274 mRNA in one or more immune cells associated with a tumor microenvironment.

82. A pharmaceutical composition comprising the oligonucleotide of claim 78, and a pharmaceutically acceptable carrier, delivery agent, or excipient.
